(19) United States
(12) Patent Application Publication
(10) Pub. No.: US 2006/0160759 A1
(43) Pub. Date: Jul. 20, 2006

(54) Influenza therapeutic

(76) Inventors: Jianzhu Chen, Brookline, MA (US); Qing Ge, Cambridge, MA (US); Herman N. Eisen, Waban, MA (US)

Correspondence Address: CHOATE, HALL & STEWART LLP, TWO INTERNATIONAL PLACE, BOSTON, MA, 02110, US

(21) Appl. No.: 11/102,097

(22) Filed: Apr. 8, 2005

Related U.S. Application Data
(63) Continuation-in-part of application No. 10/674,159, filed on Sep. 29, 2003.
(63) Continuation-in-part of application No. 10/674,087, filed on Sep. 29, 2003.
(60) Provisional application No. 60/414,457, filed on Sep. 28, 2002.
(60) Provisional application No. 60/446,377, filed on Feb. 10, 2003.
(60) Provisional application No. 60/664,580, filed on Mar. 22, 2005.

(51) Int. Cl. A61K 48/00; C12Q 1/70; C07H 21/02

(52) U.S. Cl. 514/44; 435/5; 536/23.1

(57) ABSTRACT

The present invention provides compositions comprising an RNAi-inducing entity targeted to an influenza virus transcript and any of a variety of delivery agents. The invention further includes methods of use of the compositions for inhibiting a biological activity of an influenza virus and/or for treatment or prevention of influenza. The invention provides target portion sequences that are favorably conserved for RNAi across a plurality of influenza virus A strains isolated from human hosts and/or avian hosts and RNAi-inducing entities, e.g., siRNAs and shRNAs, targeted to such favorably conserved target portions. The invention provides a variety of nucleic acids comprising sequences identical or complementary to at least a portion of one or more of these favorably conserved target portion sequences. The invention further provides methods and compositions for delivering RNAi-inducing agents to an organ or tissue of a mammalian subject, e.g., to the lung. Methods of diagnosing influenza and determining the susceptibility of an influenza virus to inhibition by an RNAi-inducing agent are also provided. Transgenic animals that express an RNAi-inducing agent targeted to an influenza gene are another aspect of the invention.

### CROSS-REFERENCE TO RELATED APPLICATIONS

[0001] This application is a continuation-in-part of U.S. Ser. No. 10/674,159 and is related to U.S. Ser. No., U.S. Ser. No. 10/674,087, both filed Sep. 29, 2003. This application claims the benefit of priority to U.S. provisional patent applications 60/414,457, filed Sep. 28, 2002; 60/446,377, filed Feb. 10, 2003; and provisional patent application entitled “Influenza Therapeutic”, filed Mar. 22, 2005, serial number not yet available. The contents of each of these applications is incorporated herein by reference.

### GOVERNMENT SUPPORT

[0002] The United States Government has provided grant support utilized in the development of the present invention. In particular, National Institutes of Health grant numbers 5-RO1-AI44477, 5-RO1-AI44478, 5-ROI-CA60686, and 1-RO1-AI50631 have supported development of this invention. The Government may have certain rights in the invention.

### BACKGROUND OF THE INVENTION

[0003] Influenza is one of the most widely spread infections worldwide. In the United States between 20 and 40 thousand people die from influenza A virus infection or its complications each year. An estimated 20 to 40 million people died during the 1918 influenza A virus pandemic. During epidemics the number of influenza related hospitalizations may reach over 300,000 in a single winter season.

[0004] Several properties contribute to the epidemiological success of influenza virus. First, it is spread easily from person to person by aerosol (droplet infection). Second, small changes in influenza virus antigens are frequent (antigenic drift) so that the virus readily escapes protective immunity induced by a previous exposure to a different variant of the virus. Third, new strains of influenza virus can be easily generated by reassortment or mixing of genetic material between different strains (antigenic shift). In the case of influenza A virus, such mixing can occur between subtypes or strains that affect different species. The 1918 pandemic is thought to have been caused by a hybrid strain of virus derived from reassortment between a swine and a human influenza A virus.

[0005] Despite intensive efforts, there is still no satisfactory therapy for influenza virus infection and existing vaccines are limited in value in part because of the properties of antigenic shift and drift described above. For these reasons, global surveillance of influenza A virus has been underway for many years, and the National Institutes of Health designates it as one of the top priority pathogens for biodefense. Although current vaccines based upon inactivated virus are able to prevent illness in approximately 70-80% of healthy individuals under age 65, this percentage is far lower in the elderly or immunocompromised. In addition, the expense and potential side effects associated with vaccine administration make this approach less than optimal. Although the four antiviral drugs currently approved in the United States for treatment and/or prophylaxis of influenza are helpful, their use is limited due to concerns about side effects, compliance, and possible emergence of resistant strains. Therefore, there remains a need for the development of effective therapies for the treatment and prevention of influenza infection.

### SUMMARY OF THE INVENTION

[0006] The present invention provides novel compositions and methods for the treatment of respiratory virus infections, e.g., influenza infection due to influenza virus types A, B, and/or C. The compositions and methods are based on RNA interference (RNAi). RNAi is a conserved cellular process in which the presence of double-stranded RNA containing a portion that is complementary to a target RNA inhibits expression of the target RNA in a sequence-specific manner. Inhibition can be caused by cleavage of the target or inhibition of its translation. In contrast to currently available influenza therapeutics, the RNAi-inducing entities of the invention inhibit expression of influenza virus transcripts and thus prevent viral protein synthesis. This represents a fundamentally new approach to controlling influenza virus infection.

[0007] The invention provides RNAi-inducing agents such as short interfering RNA (siRNA) and short hairpin RNA (shRNA) molecules targeted to one or more target transcripts involved in virus production, replication, infection, and/or transcription of viral RNA, etc. In addition, the invention provides vectors whose presence within a cell results in transcription of one or more RNAs that hybridize to each other or self-hybridize to form an siRNA or shRNA that inhibits expression of at least one target transcript involved in virus production, virus infection, virus replication, and/or transcription of viral mRNA, etc. Preferably the virus is a respiratory virus. Preferred viruses are RNA viruses. RNA viruses include positive-stranded viruses and negative-stranded RNA viruses such as influenza virus. The viral genome can be segmented or non-segmented. According to certain embodiments of the invention the target transcript encodes a protein selected from the group consisting of: a polymerase, a nucleocapsid protein, a neuraminidase, a hemagglutinin, a matrix protein, and a nonstructural protein. In specific embodiments the target transcript encodes an influenza virus protein selected from the group consisting of hemagglutinin, neuraminidase, membrane protein 1, membrane protein 2, nonstructural protein 1, nonstructural protein 2, polymerase protein PB1, polymerase protein PB2, polymerase protein PA, nucleoprotein NP.

[0008] The invention also provides compositions comprising RNAi-inducing agents and/or vectors, e.g., the RNAi-inducing agents and/or vectors described herein, wherein the composition further comprises a delivery agent that facilitates delivery of the RNAi-inducing agent or vector. Preferred delivery agents include cationic polymers.

[0009] The invention further provides methods of treating or preventing viral diseases, particularly diseases caused by a respiratory virus such as influenza, by administering an inventive composition comprising an RNAi-inducing entity to a subject within an appropriate time window prior to exposure to the virus, while exposure is occurring, or following exposure, or at any point during which a subject exhibits symptoms of a disease caused by the virus. The compositions may be administered by a variety of routes. Preferred routes include intravenous, or directly into the respiratory system by inhalation, intranasally, as an aerosol, etc.

[0010] The invention provides nucleic acid sequences that represent portions of influenza virus transcripts that are preferred targets for RNAi. Certain of the preferred target portions are functionally preferred targets for RNAi. Certain of the preferred target portions are favorably conserved among multiple variants so that an RNAi-inducing agent designed based on the sequence of a specific variant will also inhibit variants whose corresponding target portion differs in sequence. Certain of the preferred target portions are highly conserved among multiple variants.

[0011] The invention provides nucleic acids comprising one or more preferred target portions, complements thereof, and fragments of either. The invention further provides nucleic acids that are RNAi-inducing entities e.g., RNAi-inducing agents and RNAi-inducing vectors that are targeted to one or more of these target portions. In preferred embodiments the RNAi-inducing entities are targeted to the NP, PA, PB1, or PB2 gene. The invention provides highly effective RNAi-inducing entities targeted to certain preferred target portions. Such highly effective RNAi-inducing entities may be particularly useful for treatment or prevention of influenza virus infection.

[0012] In particular, the invention provides an RNAi-inducing agent targeted to an influenza virus transcript, wherein the RNAi-inducing agent comprises a nucleic acid portion whose sequence comprises a sequence selected from the group consisting of: SEQ ID NOs: 272-380, its complement, or a fragment of either having a length of at least 15 nucleotides. The invention further provides an RNAi-inducing agent targeted to an influenza virus gene selected from the group consisting of the polymerase protein PB1 gene, the polymerase protein PB2 gene, the polymerase protein PA gene, and the nucleoprotein NP gene.

[0013] The invention also provides an isolated nucleic acid, or its complement, whose sequence comprises a sequence selected from the group consisting of SEQ ID NOs: 272-380, or comprises a fragment of a sequence selected from the group consisting of SEQ ID NOs: 272-380 having a length of at least 15 nucleotides, wherein the nucleic acid has a length of 100 nucleotides or less. In certain embodiments the length is at least 16 nucleotides.

[0014] The invention provides methods for diagnosis of virus infection and for determining whether a subject suspected of having a viral infection is infected with a virus of a particular type, strain, etc. In certain embodiments the method comprises determining whether a subject is infected with an influenza virus that is susceptible to inhibition by one or more of the RNAi-inducing entities of the invention. In a preferred embodiment a patient is diagnosed with influenza infection, and an RNAi-inducing entity targeted to the particular influenza strain infecting the subject is administered. The invention therefore provides integrated methods of influenza diagnosis and treatment. Certain of the diagnostic methods employ one or more nucleic acids of the invention.

[0015] The invention also provides diagnostic kits for detecting influenza virus infection and/or determining whether an influenza virus is susceptible to inhibition by an RNAi-inducing entity. The kits may comprise one or more nucleic acids of the invention and/or a probe or primer for detecting a preferred target portion of an influenza virus transcript.

[0016] The invention further provides methods of delivering RNAi-inducing entities to the respiratory tract of a mammalian subject. The inventors have discovered that RNAi-inducing entities can effectively silence gene expression in the lung when delivered directly to the respiratory tract of a mammalian subject. The inventors have further discovered that RNAi-inducing agents such as siRNA can be delivered directly to the vascular system of a mammalian subject using conventional volumes and administration methods and can effectively silence gene expression in the respiratory system, e.g., in the lung. For example, siRNA targeted to influenza virus transcripts inhibited influenza production in the lung when delivered to mice by either the intravenous or the inhalational route, indicating that therapeutically effective inhibition of gene expression in the respiratory system can be achieved by either method. In addition, siRNA targeted to a luciferase transcript silenced luciferase expression in the lung when administered by either the inhalational or intravenous route to mice that expressed luciferase, indicating that expression of essentially any gene can be inhibited using either of these methods. siRNA targeted to an endogenous gene was also effective in inhibiting expression in the lung when delivered by inhalation. The invention therefore provides methods that allow the use of RNAi for treating a wide range of diseases that affect the respiratory system including infections caused by respiratory viruses. The methods of intravascular delivery can also be employed to deliver effective amounts of an RNAi-inducing agent to organs or tissues other than the lung.

[0017] In one aspect, the invention provides a method of inhibiting expression of a transcript in an organ or tissue of a mammalian subject comprising introducing an RNAi-inducing entity such as an RNAi-inducing agent targeted to the transcript directly into the respiratory system of the subject. In a preferred embodiment the organ or tissue is part of the respiratory tract, e.g., the lung. Thus the invention provides a method of inhibiting expression of a transcript in the respiratory system of a mammalian subject comprising introducing an RNAi-inducing entity such as an RNAi-inducing agent targeted to the transcript directly into the respiratory system of the subject. In other embodiments the RNAi-inducing entity is delivered directly to the respiratory system, enters a vessel, and is transported via the vascular system to a site of activity other than the respiratory system, i.e., the respiratory route is used for systemic delivery.

[0018] The invention further provides a method of inhibiting expression of a transcript in the respiratory system of a mammalian subject comprising introducing an RNAi-inducing agent targeted to the transcript directly into the vascular system of a mammalian subject.

[0019] In another aspect, the invention provides a method of inhibiting expression of a transcript in an organ or tissue of a mammalian subject comprising introducing an RNAi-inducing agent targeted to the transcript directly into the vascular system of a mammalian subject. In another embodiment the invention provides a method of inhibiting expression of a transcript in a solid organ or tissue of a mammalian subject comprising introducing an RNAi-inducing entity such as an RNAi-inducing agent targeted to the transcript into the respiratory system of the subject, wherein the RNAi-inducing agent enters the vascular system and is transported to a location elsewhere in the body. In certain embodiments of any of the foregoing methods the RNAi-inducing agent is administered in an aqueous medium essentially free of lipids or delivery-enhancing polymers. In other embodiments of the invention the RNAi-inducing agent is administered in a composition that comprises a cationic polymer.

[0020] The invention provides compositions suitable for delivery to the respiratory system. In particular, the invention provides respirable aerosol formulations containing liquid or solid particles (e.g., dry powders) that comprise one or more of the inventive RNAi-inducing agents and/or RNAi-inducing vectors. The formulations may comprise a delivery agent and/or excipient. The invention also provides nasal sprays comprising the RNAi-inducing agents or RNAi-inducing vectors. The invention further provides a device for delivering a composition of the invention, e.g., a device such as an inhaler or nebulizer for delivery of a dry or liquid aerosol formulation to the respiratory system. The device may deliver single or multiple doses of the composition. An inventive composition may be provided inside the device and/or it may be provided separately (e.g. as a refill). The device may be disposable.

[0021] In another aspect, the invention provides non-human transgenic animals that express an RNAi-inducing agent targeted to an influenza gene.

[0022] This application refers to various patents, journal articles, and other publications, all of which are incorporated herein by reference. In addition, the following standard reference works are incorporated herein by reference: Ausubel, F., et al. (eds.) Current Protocols in Molecular Biology, Current Protocols in Immunology, Current Protocols in Protein Science, and Current Protocols in Cell Biology, John Wiley & Sons, N.Y., edition as of July 2002; Sambrook, Russell, and Sambrook, Molecular Cloning: A Laboratory Manual, 3^{rd} ed., Cold Spring Harbor Laboratory Press, Cold Spring Harbor, 2001; Goodman and Gilman's The Pharmacological Basis of Therapeutics, 10^{th} Ed. McGraw Hill, 2001.

[0023] Unless otherwise defined, all technical and scientific terms used herein have the same meaning as commonly understood by one of ordinary skill in the art to which this invention belongs. Although methods and materials similar or equivalent to those described herein can be used in the practice or testing of the present invention, suitable methods and materials are described below. In the case of conflict, the present specification, including definitions, will control. In addition, the materials, methods, and examples are illustrative only and are not intended to be limiting. Other features and advantages of the invention will be apparent from the following detailed description and claims. Where elements are listed in Markush group format, it is to be understood that each subgroup of these elements is also disclosed, and any element(s) can be removed from the group. Where ranges are given, endpoints are included unless otherwise stated or otherwise evident from the context.

### BRIEF DESCRIPTION OF THE DRAWING

[0024] FIG. 1A, adapted from Julkunen, I., et al., infra, presents a schematic of the influenza virus.

[0025] FIG. 1B, adapted from Fields' Virology, infra, shows the genome structure of the influenza virus and the transcripts derived from the influenza genome. Thin lines at the 5′ and 3′-termini of the mRNAs represent untranslated regions. Shaded or hatched areas represent coding regions in the 0 or +1 reading frames, respectively. Introns are depicted by V-shaped lines. Small rectangles at the 5′ ends of the mRNAs represent heterogenous cellular RNAs covalently linked to the viral nucleic acids. A₍ₙ₎ symbolizes the polyA tail.

[0026] FIG. 2, adapted from Julkunen, I., et al., infra, shows the influenza virus replication cycle.

[0027] FIG. 3 shows the structure of siRNAs observed in the Drosophila system.

[0028] FIG. 4 schematically represents of the steps involved in RNA interference in Drosophila.

[0029] FIG. 5 shows a variety of exemplary siRNA and shRNA structures useful in accordance with the present invention.

[0030] FIG. 6 represents an alternative inhibitory pathway, in which the DICER enzyme cleaves a substrate having a base mismatch in the stem to generate an inhibitory product that binds to the 3′ UTR of a target transcript and inhibits translation.

[0031] FIG. 7 presents one example of a construct that may be used to direct transcription of both strands of an inventive siRNA.

[0032] FIG. 8 depicts one example of a construct that may be used to direct transcript of a single RNA molecule that hybridizes to form an shRNA in accordance with the present invention.

[0033] FIG. 9 shows a sequence comparison between six strains of influenza virus A that have a human host of origin. Dark shaded areas were used to design siRNAs that were tested as described in Example 2. The base sequence is the sequence of strain A/Puerto Rico/8/34. Lightly shaded letters indicate nucleotides that differ from the base sequence.

[0034] FIG. 10 shows a sequence comparison between two strains of influenza virus that have a human host of origin and five strains of influenza virus A that have an animal host of origin. Darkly shaded areas were used to design siRNAs that were tested as described in Example 2. The base sequence is the sequence of strain A/Puerto Rico/8/34. Lightly shaded letters indicate nucleotides that differ from the base sequence.

[0035] FIGS. 11A-11F show the results of experiments indicating that siRNA inhibits influenza virus production in MDCK cells. Six different siRNAs that target various viral transcripts were introduced into MDCK cells by electroporation, and cells were infected with virus 8 hours later. FIG. 11A is a time course showing viral titer in culture supernatants as measured by hemagglutinin assay at various times following infection with viral strain A/PR/8/34 (H1N1) (PR8), at a multiplicity of infection (MOI) of 0.01 in the presence or absence of the various siRNAs or a control siRNA. FIG. 11B is a time course showing viral titer in culture supernatants as measured by hemagglutinin assay at various times following infection with influenza virus strain A/WSN/33 (H1N1) (WSN) at an MOI of 0.01 in the presence or absence of the various siRNAs or a control siRNA. FIG. 11C shows a plaque assay showing viral titer in culture supernatants from virus infected cells that were either mock transfected or transfected with siRNA NP-1496. FIG. 11D shows inhibition of influenza virus production at different doses of siRNA. MDCK cells were transfected with the indicated amount of NP-1496 siRNA followed by infection with PR8 virus at an MOI of 0.01. Virus titer was measured 48 hours after infection. Representative data from one of two experiments are shown. FIG. 11E shows inhibition of influenza virus production by siRNA administered after virus infection. MDCK cells were infected with PR8 virus at an MOI of 0.01 for 2 hrs and then transfected with NP-1496 (2.5 nmol). Virus titer was measured at the indicated times after infection. Representative data from one of two experiments are shown.

[0036] FIG. 12 shows a sequence comparison between a portion of the 3′ region of NP sequences among twelve influenza A virus subtypes or isolates that have either a human or animal host of origin. The shaded area was used to design siRNAs that were tested as described in Examples 2 and 3. The base sequence is the sequence of strain A/Puerto Rico/8/34. Shaded letters indicate nucleotides that differ from the base sequence.

[0037] FIG. 13 shows positions of various siRNAs relative to influenza virus gene segments, correlated with effectiveness in inhibiting influenza virus.

[0038] FIG. 14A is a schematic of a developing chicken embryo indicating the area for injection of siRNA and siRNA/delivery agent compositions.

[0039] FIG. 14B shows the ability of various siRNAs to inhibit influenza virus production in developing chicken embryos.

[0040] FIG. 15 is a schematic showing the interaction of nucleoprotein with viral RNA molecules.

[0041] FIGS. 16A and 16B show schematic diagrams illustrating the differences between influenza virus vRNA, mRNA, and cRNA (template RNA) and the relationships between them. The conserved 12 nucleotides at the 3′ end and 13 nucleotides at the 5′ end of each influenza A virus vRNA segment are indicated in FIG. 16B. The mRNAs contain an m⁷GpppN^{m} cap structure and, on average, 10 to 13 nucleotides derived from a subset of host cell RNAs. Polyadenylation of the mRNAs occurs at a site in the mRNA corresponding to a location 15 to 22 nucleotides before the 5′ end of the vRNA segment. Arrows indicate the positions of primers specific for each RNA species. (Adapted from ref. (1)).

[0042] FIG. 17 shows amounts of viral NP and NS RNA species at various times following infection with virus, in cells that were mock transfected or transfected with siRNA NP-1496 6-8 hours prior to infection.

[0043] FIG. 18A shows that inhibition of influenza virus production requires a wild type (wt) antisense strand in the duplex siRNA. MDCK cells were first transfected with siRNAs formed from wt and modified (m) strands and infected 8 hrs later with PR8 virus at MOI of 0.1. Virus titers in the culture supernatants were assayed 24 hrs after infection. Representative data from one of the two experiments are shown. FIG. 18B shows that M-specific siRNA inhibits the accumulation of specific mRNA. MDCK cells were transfected with M-37, infected with PR8 virus at MOI of 0.01, and harvested for RNA isolation 1, 2, and 3 hrs after infection. The levels of M-specific mRNA, cRNA, and vRNA were measured by reverse transcription using RNA-specific primers, followed by real time PCR. The level of each viral RNA species is normalized to the level of γ-actin mRNA (bottom panel) in the same sample. The relative levels of RNAs are shown as mean value ±S.D. Representative data from one of the two experiments are shown.

[0044] FIGS. 19A-D show that NP-specific siRNA inhibits the accumulation of not only NP- but also M- and NS-specific mRNA, vRNA, and cRNA. MDCK (A-C) and Vero (D) cells were transfected with NP-1496, infected with PR8 virus at MOI of 0.1, and harvested for RNA isolation 1, 2, and 3 hrs after infection. The levels of mRNA, cRNA, and vRNA specific for NP, M, and NS were measured by reverse transcription using RNA-specific primers followed by real time PCR. The level of each viral RNA species is normalized to the level of γ-actin mRNA (not shown) in the same sample. The relative levels of RNAs are shown. Representative data from one of three experiments are shown.

[0045] FIGS. 19E-G, right side in each figure, show that PA-specific siRNA inhibits the accumulation of not only PA- but also M- and NS-specific mRNA, vRNA, and cRNA. MDCK cells were transfected with PA-1496, infected with PR8 virus at MOI of 0.1, and harvested for RNA isolation 1, 2, and 3 hrs after infection. The levels of mRNA, cRNA, and vRNA specific for PA, M, and NS were measured by reverse transcription using RNA-specific primers followed by real time PCR. The level of each viral RNA species is normalized to the level of γ-actin mRNA (not shown) in the same sample. The relative levels of RNAs are shown.

[0046] FIG. 19H shows that NP-specific siRNA inhibits the accumulation of PB1—(top panel), PB2—(middle panel) and PA—(lower panel) specific mRNA. MDCK cells were transfected with NP-1496, infected with PR8 virus at MOI of 0.1, and harvested for RNA isolation 1, 2, and 3 hrs after infection. The levels of mRNA specific for PB 1, PB2, and PA mRNA were measured by reverse transcription using RNA-specific primers followed by real time PCR. The level of each viral RNA species is normalized to the level of γ-actin mRNA (not shown) in the same sample. The relative levels of RNAs are shown.

[0047] FIG. 20A shows sequences of siRNA CD8-61 and its hairpin derivative CD8-61F.

[0048] FIG. 20B shows inhibition of CD8α expression by CD8-61 and CD8-61F. A CD8⁺CD4⁺ T cell line was transfected with either CD8-61 or CD8-61F by electroporation. CD8α expression was assayed by flow cytometry 48 hrs later. Unlabeled line, mock transfection.

[0049] FIG. 20C shows a schematic diagram of the pSLOOP III vector, in which expression of CD8-61F hairpin RNA is driven by H1 RNA pol III promoter. Terminator, termination signal sequence.

[0050] FIG. 20D presents plots showing silencing of CD8α in HeLa cells using pSLOOP III. Untransfected cells did not express CD8α. Cells were transfected with the CD8α expression vector and either a promoterless pSLOOP III-CD8-61F construct, synthetic siRNA, or a pSLOOP III-CD8-61F containing a promoter.

[0051] FIG. 21A shows schematic diagrams of NP-1496 and GFP-949 siRNA and their hairpin derivatives/precursors.

[0052] FIG. 21B shows tandem arrays of NP-1496H and GFP-949H in two different orders.

[0053] FIG. 21C shows pSLOOP III expression vectors. Hairpin precursors of siRNA are cloned in the pSLOOP III vector alone (top), in tandem arrays (middle), or simultaneously with independent promoter and termination sequence (bottom).

[0054] FIG. 22A is a plot showing that siRNA inhibits influenza virus production in mice when administered together with the cationic polymer PEI prior to infection with influenza virus. Filled squares (no treatment); Open squares (GFP siRNA); Open circles (30 μg NP siRNA); Filled circles (60 μg NP siRNA). Each symbol represents an individual animal. p values between different groups are shown.

[0055] FIG. 22B is a plot showing that siRNA inhibits influenza virus production in mice when administered together with the cationic polymer PLL prior to infection with influenza virus. Filled squares (no treatment); Open squares (GFP siRNA); Filled circles (60 μg NP siRNA). Each symbol represents an individual animal. p values between different groups are shown.

[0056] FIG. 22C is a plot showing that siRNA inhibits influenza virus production in mice when administered together with the cationic polymer jetPEI prior to infection with influenza virus significantly more effectively than when administered in PBS. Open squares (no treatment); Open triangles (GFP siRNA in PBS); Filled triangles (NP siRNA in PBS); Open circles (GFP siRNA with jetPEI); Filled circles (NP siRNA with jetPEI). Each symbol represents an individual animal. p values between different groups are shown.

[0057] FIG. 22D is a plot showing that siRNA targeted to NP inhibits influenza virus production in mice when administered intravenously together with a cationic poly(beta amino ester) (J28). Open circles (no treatment); Filled squares (NP siRNA with J28).

[0058] FIG. 22E is a plot showing that siRNA targeted to NP inhibits influenza virus production in mice when administered intraperitoneally together with a cationic poly(beta amino ester) (J28 or C32) while a control RNA (GFP) has no significant effect. Open circles (no treatment); Open squares (GFP siRNA with J28) Filled squares (NP siRNA with J28); Open triangles (GFP siRNA with C32); Filled triangles (NP siRNA with C32). p values between control and treated groups are shown.

[0059] FIG. 23 is a plot showing that siRNAs targeted to influenza virus NP and PA transcripts exhibit an additive effect when administered together prior to infection with influenza virus. Filled squares (no treatment); Open circles (60 μg NP siRNA); Open triangles (60 μg PA siRNA); Filled circles (60 μg NP siRNA+60 μg PA siRNA). Each symbol represents an individual animal. p values between different groups are shown.

[0060] FIG. 24 is a plot showing that siRNA inhibits influenza virus production in mice when administered following infection with influenza virus. Filled squares (no treatment); Open squares (60 μg GFP siRNA); Open triangles (60 μg PA siRNA); Open circles (60 μg NP siRNA); Filled circles (60 μg NP+60 μg PA siRNA). Each symbol represents an individual animal. p values between different groups are shown.

[0061] FIG. 25A is a schematic diagram of a lentiviral vector expressing a shRNA. Transcription of shRNA is driven by the U6 promoter. EGFP expression is driven by the CMV promoter. SIN-LTR, Ψ, cPPT, and WRE are lentivirus components. The sequence of NP-1496 shRNA is shown.

[0062] FIG. 25B presents plots of flow cytometry results demonstrating that Vero cells infected with the lentivirus depicted in FIG. 25B express EGFP in a dose-dependent manner. Lentivirus was produced by co-transfecting DNA vector encoding NP-1496a shRNA and packaging vectors into 293T cells. Culture supernatants (0.25 ml or 1.0 ml) were used to infect Vero cells. The resulting Vero cell lines (Vero-NP-0.25 and Vero-NP-1.0) and control (uninfected) Vero cells were analyzed for GFP expression by flow cytometry. Mean fluorescence intensity of Vero-NP-0.25 (upper portion of figure) and Vero-NP-1.0 (lower portion of figure) cells are shown. The shaded curve represents mean fluorescence intensity of control (uninfected) Vero cells.

[0063] FIG. 25C is a plot showing inhibition of influenza virus production in Vero cells that express NP-1496 shRNA. Parental and NP-1496 shRNA expressing Vero cells were infected with PR8 virus at MOI of 0.04, 0.2 and 1. Virus titers in the supernatants were determined by hemagglutination (HA) assay 48 hrs after infection.

[0064] FIG. 26 is a plot showing that influenza virus production in mice is inhibited by administration of DNA vectors that express siRNA targeted to influenza virus transcripts. Sixty μg of DNA encoding RSV, NP-1496 (NP) or PB1-2257 (PB1) shRNA were mixed with 40 μl Infasurf and were administered into mice by instillation. For no treatment (NT) group, mice were instilled with 60 μl of 5% glucose. Thirteen hrs later, the mice were infected intranasally with PR8 virus, 12000 pfu per mouse. The virus titers in the lungs were measured 24 hrs after infection by MDCK/hemagglutinin assay. Each data point represents one mouse. p values between groups are indicated.

[0065] FIG. 27A shows results of an electrophoretic mobility shift assay for detecting complex formation between siRNA and poly-L-lysine (PLL). siRNA-polymer complexes were formed by mixing 150 ng of NP-1496 siRNA with increasing amounts of polymer (0-1200 ng) for 30 min at room temperature. The reactive mixtures were then run on a 4% agarose gel and siRNAs were visualized with ethidium-bromide staining.

[0066] FIG. 27B shows results of an electrophoretic mobility shift assay for detecting complex formation between siRNA and poly-L-arginine (PLA). SiRNA-polymer complexes were formed by mixing 150 ng of NP-1496 siRNA with increasing amounts of polymer (0-1200 ng) for 30 min at room temperature. The reactive mixtures were then run on a 4% agarose gel and siRNAs were visualized with ethidium-bromide staining.

[0067] FIG. 28A is a plot showing cytotoxicity of siRNA/PLL complexes. Vero cells in 96-well plates were treated with siRNA (400 pmol)/polymer complexes for 6 hrs. The polymer-containing medium was then replaced with DMEM-10% FCS. The metabolic activity of the cells was measured 24 h later by using the MTT assay. Squares=PLL (MW ˜8K); Circles=PLL (MW ˜42K) Filled squares=25%; Open triangles=50%; Filled triangles=75%; X=95%. The data are shown as the average of triplicates.

[0068] FIG. 28B is a plot showing cytotoxicity of siRNA/PLA complexes. Vero cells in 96-well plates were treated with siRNA (400 pmol)/polymer complexes for 6 hrs. The polymer-containing medium was then replaced with DMEM-10% FCS. The metabolic activity of the cells was measured 24 h later by using the MTT assay. The data are shown as the average of triplicates.

[0069] FIG. 29A is a plot showing that PLL stimulates cellular uptake of siRNA. Vero cells in 24-well plates were incubated with Lipofectamine+siRNA (400 pmol) or with siRNA (400 pmol)/polymer complexes for 6 hrs. The cells were then washed and infected with PR8 virus at a MOI of 0.04. Virus titers in the culture supernatants at different time points after infection were measured by HA assay. Polymer to siRNA ratios are indicated. Open circles=no treatment; Filled squares=Lipofectamine; Filled triangles=PLL (MW ˜42K); Open triangles=PLL (MW ˜8K).

[0070] FIG. 29B is a plot showing that poly-L-arginine stimulates cellular uptake of siRNA. Vero cells in 24-well plates were incubated with siRNA (400 pmol)/polymer complexes for 6 hrs. The cells were then washed and infected with PR8 virus at a MOI of 0.04. Virus titers in the culture supernatants at different time points after infection were measured by HA assay. Polymer to siRNA ratios are indicated. 0, 25, 50, 75, and 95% refer to percentage of ε-amino groups on PLL substituted with imidazole acetyl groups. Closed circles=no transfection; Open circles=Lipofectamine; Open and filled squares=0% and 25% (Note that the data points for 0% and 25% are identical); Filled triangles=50%; Open triangles=75%; X=95%.

[0071] FIG. 30A is a bar graph showing that PEI mediates DNA transfection in the lungs after intravenous injection. Luc activities in relative light units in 0.5 mg of protein in different organs over 4 days are shown. Data are from one of two experiments.

[0072] FIG. 30B is a bar graph showing that PEI mediates DNA transfection in the lungs after intratracheal administration. The figure shows average Luc activities in relative light units in 0.5 mg of protein in the indicated organs of three mice per group 24 hr after DNA administration. Error bars indicate standard deviation.

[0073] FIG. 30C is a bar graph showing inhibition of luciferase activity in the lung by intravenous delivery of siRNA. The -figure shows average Luc activities in relative light units in 0.5 mg of protein in the indicated organs for three mice per group 24 hr after administration of a luciferase construct. Error bars indicate standard deviation.

[0074] FIG. 30D is a bar graph showing inhibition of luciferase activity in the lung by inhalational delivery of siRNA. The figure shows average Luc activities in relative light units in 0.5 mg of protein in the lungs of mice 24 hr after administration of a luciferase construct. Error bars indicate standard deviation. Experiments were performed in duplicate using 3 mice per group, and similar results were obtained. Results of one of the experiments are presented here.

[0075] FIGS. 31A and 31B are plots showing that administration of siRNA without a delivery agent inhibits influenza virus production in mice.

[0076] FIGS. 32A -32J show sequences of influenza virus strain PR8 transcripts that were used for selection of target portions for RNAi.

[0077] FIG. 33 is Table 17, which shows the sequences of functional target portions for RNAi to inhibit influenza virus.

[0078] FIG. 34 is Table 18, which shows the sequences of influenza virus target portions that are favorably conserved for RNAi among influenza virus strains derived from humans.

[0079] FIG. 35 is Table 20, which shows the sequences of influenza virus target portions that are favorably conserved for RNAi among influenza virus strains derived from humans and avians.

### ABBREVIATIONS

[0080] DNA: deoxyribonucleic acid

[0081] RNA: ribonucleic acid

[0082] vRNA: virion RNA in the influenza virus genome, negative strand

[0083] cRNA: complementary RNA, a direct transcript of vRNA, positive strand

[0084] mRNA: messenger RNA transcribed from vRNA or cellular genes, positive strand, a template for protein synthesis

[0085] dsRNA: double-stranded RNA

[0086] siRNA: short interfering RNA

[0087] shRNA: short hairpin RNA

[0088] miRNA: microRNA

[0089] RNAi: RNA interference

[0090] bp: base pair(s)

[0091] nt: nucleotide(s)

### DEFINITIONS

[0092] As used herein, the terms “approximately” or “about” in reference to a number are generally taken to include numbers that fall within a range of 5% of the number in either direction (greater than or less than the number) unless otherwise stated or otherwise evident from the context (except where such number would exceed 100% of a possible value).

[0093] The term “avian” as used herein is intended to refer to any species, subspecies or race of organism of the taxonomic class ava, e.g., chicken, turkey, duck, goose, quail, pheasants, parrots, finches, hawks, and crows. The term includes the various known strains of Gallus gallus, or chickens, (for example, White Leghorn, Brown Leghorn, Barred-Rock, Sussex, New Hampshire, Rhode Island, Ausstralorp, Minorca, Amrox, California Gray, Italian Partidge-colored), as well as strains of turkeys, pheasants, quails, duck, ostriches and other poultry commonly bred.

[0094] The term “complementary” is used herein in accordance with its art-accepted meaning to refer to the capacity for precise pairing between particular bases, nucleosides, nucleotides or nucleic acids. For example, adenine (A) and uridine (U) are complementary; adenine (A) and thymidine (T) are complementary; and guanine (G) and cytosine (C), are complementary and are referred to in the art as Watson-Crick base pairings. If a nucleotide at a certain position of a first nucleic acid sequence is complementary to a nucleotide located opposite in a second nucleic acid sequence when the strands are aligned in anti-parallel orientation, the nucleotides form a complementary base pair, and the nucleic acids are complementary at that position. The percent complementarity of a first nucleic acid to a second nucleic acid may be evaluated by aligning them in antiparallel orientation for maximum complementarity over a window of evaluation along the second nucleic acid, determining the total number of nt in both strands that form complementary base pairs within the window, dividing by the total number of nt within the window, and multiplying by 100. For example, AAAAAAAA and TTTGTTAT are 75% complementary since there are 12 nt in complementary base pairs out of a total of 16. Nucleic acids that are at least 70% complementary over a window of evaluation are considered substantially complementary over that window. When computing the number of complementary nt needed to achieve a particular % complementarity, fractions are rounded to the nearest whole number. A position occupied by non-complementary nucleotides constitutes a mismatch, i.e., the position is occupied by a non-complementary base pair. In order to achieve maximum complementarity gaps may be introduced into either or both of the nucleic acids within a window of evaluation. Nucleotide(s) opposite a gap is/are unpaired and constitute a bulge, i.e., there is no nucleotide located opposite in the other nucleic acid. Typically a percent complementarity is determined over a window of evaluation of at least 15 nt in length, e.g., 19 nt, where the length does not include gaps. For purposes of determining % complementarity, a 1 nt bulge is considered to be a single non-complementary nt; a bulge of between 2 and 5 nt is considered to be 2 non-complementary nt; a bulge of between 6 and 10 nt is considered to be 3 non-complementary nt. A bulge of length K nt, where K is greater than 10, is considered to be 3+(K−10) non-complementary nt.

[0095] “Directly into the respiratory system” refers to administration via the nose, mouth, or trachea, preferably the nose or mouth, such that a significant fraction of an active agent in the composition (e.g., more than 10%, preferably more than 25% of the active agent, by weight) enters the upper and/or lower respiratory tract.

[0096] “Directly into the vascular system” refers to administration into a vessel (e.g., an artery or vein) by injection or catheter or any other method in which the vascular system is entered from outside the body, typically involving penetrating the wall of a vessel. “Indirectly into the vascular system” refers to a mode of administration in which the vascular system is not penetrated. A preferred example of indirect delivery of a substance to the vascular system is direct delivery of the substance to the respiratory system, followed by passage of the substance across a vessel wall. The substance may then be transported to a target tissue or organ elsewhere in the body (and may return to the lung).

[0097] An “effective amount” of an active agent refers to the amount of the active agent sufficient to elicit a desired biological response. As will be appreciated by those of ordinary skill in this art, the absolute amount of a particular agent that is effective may vary depending on such factors as the desired biological endpoint, the agent to be delivered, the target tissue, etc. An “effective amount” may be administered in a single dose or multiple doses. For example, an effective amount of an RNAi-inducing entity may be an amount sufficient to achieve one or more of the following: (i) reduce expression of a target transcript by at least 20%, preferably at least 40%; (ii) reduce virus titer by at least 25%; (iii) reduce virus titer by at least 2-fold; (iv) delay or prevent the development of clinically significant virus infection; (v) reduce the duration or severity of at least one symptom of a virus infection, etc.

[0098] A composition is “essentially free” of a substance if the composition contains less than 1% of the substance by weight, preferably less than 0.5%, more preferably less than 0.1%. More preferably the substance is entirely absent from the composition. A composition is considered essentially free of delivery-enhancing polymers or lipids if no such polymer or lipid has been deliberately included in the composition.

[0099] The term “hybridize”, as used herein, refers to the interaction between two nucleic acid sequences comprising or consisting of complementary portions such that a duplex structure is formed that is stable under the particular conditions of interest, e.g., in a eukaryotic cell, in a Drosophila lysate, etc. Typically a first nucleic acid is considered to hybridize to a second nucleic acid if the Tm of a duplex formed by the first and second nucleic acids is less than 15° C. below, preferably less than 10° C. below the Tm of a duplex that would be formed by the second nucleic acid and a third nucleic acid that is the same length as, and 100% complementary to, the second nucleic acid and contains nucleosides and internucleosidic linkages of the same type. Hybridization conditions suitable for various applications are known in the art and/or found in standard reference works, e.g., Ausubel, supra, and Sambrook, supra. In an exemplary embodiment, stringent hybridization conditions comprise 6× sodium chloride/sodium citrate (SSC) and 0.1% SDS at a temperature 10-15° C. below the Tm of a perfectly complementary duplex, followed by washing 1-2 times for 30 minutes in 2×SSC and 0.1% SDS at a temperature 25° C. below the Tm of a perfectly complementary duplex.

[0100] “Identity” refers to the extent to which the sequence of two or more nucleic acids is the same. The percent identity between first and second nucleic acids over a window of evaluation may be computed by aligning the nucleic acids in parallel orientation, determining the number of nucleotides within the window of evaluation that are opposite an identical nucleotide, dividing by the total number of nucleotides in the window, and multiplying by 100. When computing the number of identical nucleotides needed to achieve a particular % identity, fractions are to be rounded to the nearest whole number. Nucleic acids that are at least 70% identical over a window of evaluation, e.g., at least 80%, at least 90%, of more, are considered substantially identical over that window. Typically the window of evaluation is at least 15 nt in length along the second nucleic acid, e.g., 19 nt, where the length does not include gaps. For purposes of determining % identity, a 1 nt gap is considered to be a single nt that is not opposite an identical nt; a gap of between 2 and 5 nt is considered to be 2 nt that are not opposite an identical nt; a gap of between 6 and 10 nt is considered to be 3 nt that are not opposite an identical nt. A gap of length K nt, where K is greater than 10, is considered to be 3+(K−10) nt that are not opposite an identical nt.

[0101] The term “influenza virus” is used here to refer to any strain of influenza virus that is capable of causing disease in an animal or human subject, or that is an interesting candidate for experimental analysis. Influenza viruses are described in Fields, B., et al., Fields' Virology, 4^{th}. ed., Philadelphia: Lippincott Williams and Wilkins; ISBN: 0781718325, 2001. In particular, the term encompasses any strain of influenza A virus that is capable of causing disease in an animal or human subject, or that is an interesting candidate for experimental analysis. A large number of influenza A isolates have been partially or completely sequenced. Appendix A presents merely a partial list of complete sequences for influenza A genome segments that have been deposited in a public database (The Influenza Sequence Database (ISD), see Macken, C., Lu, H., Goodman, J., & Boykin, L., “The value of a database in surveillance and vaccine selection.” in Options for the Control of Influenza IV. A. D. M. E. Osterhaus, N. Cox & A. W. Hampson (Eds.) Amsterdam: Elsevier Science, 2001, 103-106). This database also contains complete sequences for influenza B and C genome segments. The database is available on the World Wide Web at the Web site having URL http://www.flu.lanl.gov/ along with a convenient search engine that allows the user to search by genome segment, by species infected by the virus, and by year of isolation. Influenza sequences are also available on Genbank. Sequences of influenza genes are therefore readily available to, or determinable by, those of ordinary skill in the art.

[0102] The term “in vivo”, as used herein with respect to the synthesis, processing, or activity of an RNAi-inducing agent generally refers to events that occur within a cell as opposed to in a cell-free system. In general, the cell can be maintained in tissue culture or can be part of an intact organism.

[0103] “Isolated”, as used herein, means 1) separated from at least some of the components with which it is usually associated in nature; 2) prepared or purified by a process that involves the hand of man; and/or 3) not occurring in nature. Any of the nucleic acids and nucleic acid structures described herein may be in an isolated form.

[0104] “Ligand”, as used herein, means a molecule that specifically binds to a second molecule through a mechanism other than an antigen-antibody interaction. The term encompasses, for example, polypeptides, peptides, and small molecules, either naturally occurring or synthesized, including molecules whose structure has been invented by man.

[0105] “Nucleic acid based assay” refers to any assay or method in which the presence of a nucleic acid is detected and/or a nucleic acid is identified. The assay can be qualitative or quantitative.

[0106] “Nucleobase”, as used herein, means a nitrogen-containing heterocyclic moiety capable of forming hydrogen bonds, preferably Watson-Crick hydrogen bonds, in pairing with a complementary nucleobase or nucleobase analog, e.g., a purine or a pyrimidine. Typical nucleobases are the naturally occurring nucleobases adenine, guanine, cytosine, uracil, thymine, and analogs of the naturally occurring nucleobases (Fasman, Practical Handbook of Biochemistry and Molecular Biology, pp. 385-394, CRC Press, Boca Raton, Fla., 1989). The terms “nucleobase” and “base” are used interchangeably herein.

[0107] A “nucleotide” comprises a nitrogenous base, a sugar molecule, and a phosphate group. A nucleoside comprises a nitrogenous base (nucleobase) linked to a sugar molecule. In a naturally occurring nucleic acid, phosphate groups covalently link adjacent nucleosides to form a polymer. A nucleic acid may include naturally occurring nucleosides (e.g., adenosine, thymidine, guanosine, cytidine, uridine, deoxyadenosine, deoxythymidine, deoxyguanosine, and deoxycytidine), nucleoside analogs (e.g., 2-aminoadenosine, 2-thiothymidine, inosine, pyrrolo-pyrimidine, 3-methyl adenosine, C5-propynylcytidine, C5-propynyluridine, C5-bromouridine, C5-fluorouridine, C5-iodouridine, C5-methylcytidine, 7-deazaadenosine, 7-deazaguanosine, 8-oxoadenosine, 8-oxoguanosine, O(6)-methylguanine, and 2-thiocytidine), chemically modified bases, biologically modified bases (e.g., methylated bases), intercalated bases, modified sugars (e.g., 2′-fluororibose, ribose, 2′-deoxyribose, arabinose, and hexose). A nucleoside can comprise a universal base, i.e., a base can that substitute for one, or preferably any, of the natural bases commonly found in nucleic acids when opposite them in a duplex (see, e.g., 142-149). In certain embodiments of the invention a nucleic acid comprises an abasic residue.

[0108] “Operably linked”, as used herein, refers to a relationship between two nucleic acids sequences wherein the expression of one of the nucleic acid sequences is controlled by, regulated by, modulated by, etc., the other nucleic acid sequence. For example, the transcription of a nucleic acid sequence is directed by an operably linked promoter sequence; post-transcriptional processing of a nucleic acid is directed by an operably linked processing sequence; the translation of a nucleic acid sequence is directed by an operably linked translational regulatory sequence; the transport or localization of a nucleic acid or polypeptide is directed by an operably linked transport or localization sequence; and the post-translational processing of a polypeptide is directed by an operably linked processing sequence. Preferably a nucleic acid sequence that is operably linked to a second nucleic acid sequence is covalently linked, either directly or indirectly, to such a sequence, although any effective three-dimensional association is acceptable.

[0109] The term “organ” is used as in the art, to refer to a tissue or group of tissues that constitute a morphologically and functionally distinct part of an organism. Examples include lung, heart, liver, pancreas, breast, kidney, intestine, bladder, bone, skin, etc. The term “tissue” is used as in the art, to refer to a group of cells, usually of similar structure, typically organized to perform one or more identical or related functions. Red blood cells, white blood cells, and platelets are considered to be circulating tissues comprising individual cells or cell fragments.

[0110] “Preventing” refers to causing a disease, disorder, condition, or symptom or manifestation of such, or worsening of the severity of such, not to occur. Preventing includes reducing the risk that a disease, disorder, condition, or symptom or manifestation of such, or worsening of the severity of such, will occur. Thus if a composition or method reduces the risk that a disease, disorder, condition, or symptom or manifestation of such, or worsening of the severity of such will occur on an individual or population basis, the composition or method is said to prevent the disease, disorder, condition, or symptom or manifestation of such, or worsening of the severity of such.

[0111] The term “primer” as used herein refers to an oligonucleotide, whether natural or synthetic, that is capable of acting as a point of initiation of nucleic acid synthesis when hybridized to a nucleic acid template under conditions in which primer extension, e.g., polymerase-catalyzed primer extension, is initiated. The appropriate length of a primer depends on the intended use of the primer, but typically ranges from 15 to 35 nt. In some cases a primer may be longer, e.g., up to about 60 nt in length. Short primer molecules generally require cooler temperatures to form sufficiently stable hybrid complexes with a template. A primer need not reflect the exact sequence of the template but must be sufficiently complementary to hybridize with a template for primer elongation to occur.

[0112] The term “probe” as used herein, when referring to a nucleic acid, refers to a nucleic acid that can hybridize with and thereby detect the presence of a complementary nucleic acid The probe should be sufficiently complementary to the nucleic acid being detected so that specific hybridization can occur under the hybridization stringency conditions used. The probe may be modified with labels such as fluorescent moieites, biotin, etc.

[0113] “Purified”, as used herein, means separated from many other compounds or entities. A compound or entity may be partially purified, substantially purified, or pure, where it is pure when it is removed from substantially all other compounds or entities, i.e., is preferably at least about 90%, more preferably at least about 91%, 92%, 93%, 94%, 95%, 96%, 97%, 98%, 99%, or greater than 99% pure.

[0114] The term “regulatory sequence” is used herein to describe a region of nucleic acid sequence that directs, enhances, or inhibits the expression (particularly transcription, but in some cases other events such as splicing or other processing) of sequence(s) with which it is operatively linked. The term includes expression signals such as promoters, enhancers and other transcriptional control elements. In some embodiments of the invention, regulatory sequences may direct constitutive expression of a nucleotide sequence; in other embodiments, regulatory sequences may direct tissue-specific and/or inducible expression. A regulatory sequence may direct expression of a nucleotide sequence only in cells that have been infected with an infectious agent. For example, the regulatory sequence may comprise a promoter and/or enhancer such as a virus-specific promoter or enhancer that is recognized by a viral protein, e.g., a viral polymerase, transcription factor, etc. Alternately, the regulatory sequence may comprise a promoter and/or enhancer that is active in epithelial cells, e.g., respiratory epithelial cells. For example, a promoter for a gene that encodes a surfactant protein can be used.

[0115] “Respiratory system” refers to any component upper respiratory tract (e.g., e.g., nasal passages, nasopharynx, oropharynx) or lower respiratory tract (e.g., trachea, bronchi, bronchioles, and/or alveoli). The larynx can be considered a component of either the upper or lower respiratory tract. The terms “respiratory system” and “respiratory tract” are used interchangeably herein.

[0116] A “respiratory virus” is a virus that infects cells present in the upper and/or lower respiratory tract of a subject. Preferably the virus infects respiratory epithelial cells. Other cells that may be infected include, but are not limited to, bronchoalveolar macrophages, dendritic cells, etc. Examples of respiratory viruses include: influenza virus, parainfluenza virus (PIV), pneumovirus, metapneumovirus, coronavirus, adenovirus, rhinovirus, respiratory syncytial virus (RSV), reovirus, herpes virus, and hantavirus.

[0117] The term “RNAi-inducing agent” is used to refer to siRNAs, shRNAs, and other double-stranded structures (e.g., dsRNA) that can be processed to yield an siRNA or shRNA or other small RNA species that inhibits expression of a target transcript by RNA interference. In certain embodiments of the invention an RNAi-inducing agent inhibits expression of a target RNA via an RNA interference pathway that involves translational repression.

[0118] The term “RNAi-inducing entity”, encompasses RNA molecules and vectors whose presence within a cell results in RNAi and leads to reduced expression of a transcript to which the RNAi-inducing entity is targeted. The RNAi-inducing entity may be, for example, an RNAi-inducing agent such as an siRNA, shRNA, or an RNAi-inducing vector. Use of the terms “RNAi-inducing entity”, “RNAi-inducing agent”, or “RNAi-inducing vector” is not intended to imply that the entity, agent, or vector upregulates or activates RNAi in general, though it may do so, but simply to indicate that presence of the entity, agent, or vector within the cell results in RNAi-mediated reduction in expression of a target transcript. An “RNAi-inducing entity” as used herein is an entity that has been modified or generated by the hand of man and/or whose presence in a cell is a result of human intervention as distinct, e.g., from endogenous RNA species or RNA species that are produced in a cell during the natural course of viral infection.

[0119] An “RNAi-inducing vector” is a vector whose presence within a cell results in transcription of one or more RNAs that hybridize to each other or self-hybridize to form an RNAi-inducing agent such as an siRNA or shRNA. In various embodiments of the invention this term encompasses plasmids or viruses whose presence within a cell results in production of one or more RNAs that self-hybridize or hybridize to each other to form an RNAi-inducing agent. In general, the vector comprises a nucleic acid operably linked to expression signal(s) so that one or more RNA molecules that hybridize or self-hybridize to form an RNAi-inducing agent is transcribed when the vector is present in a cell. Thus the vector provides a template for intracellular synthesis of the RNAi-inducing agent. For purposes of inducing RNAi, presence of a viral genome in a cell constitutes presence of the virus within the cell. A vector is considered to be present within a cell if it is introduced into the cell, enters the cell, or is inherited from a parental cell, regardless of whether it is subsequently modified or processed within the cell. An RNAi-inducing vector is considered to be targeted to a transcript if the vector comprises a template for transcription of an RNAi-inducing agent that is targeted to the transcript. Such vectors have a number of other uses in addition to transcript inhibition in a cell. For example, they may be used for in vitro production of an RNAi-inducing agent and/or for production of the agent in a cell that may or may not contain a transcript to which the vector is targeted.

[0120] A “short, interfering RNA” comprises a double-stranded (duplex) RNA that is between 15 and approximately 29 nucleotides in length or any other subrange or specific value within the interval between 15 and 29, e.g., 16-18, 17-19, 21-23, 24-27, 27-29 nt long and optionally further comprises one or two single-stranded overhangs, e.g., a 3′ overhang on one or both strands. In certain embodiments the duplex is approximately 19 nt long. The overhang may be, e.g., 1-6 residues in length, e.g., 2 nt. An siRNA may be formed from two RNA molecules that hybridize together or may alternatively be generated from an shRNA. In certain embodiments of the invention one or both of the 5′ ends of an siRNA has a phosphate group while in other embodiments one or more of the 5′ ends lacks a phosphate group. In certain embodiments of the invention one or both of the 3′ ends has a hydroxyl group while in other embodiments they do not. One strand of an siRNA, which is referred to as the “antisense strand” or “guide strand” includes a portion that hybridizes with a target transcript. In certain preferred embodiments of the invention, the antisense strand of the siRNA is 100% complementary with a region of the target transcript, i.e., it hybridizes to the target transcript without a single mismatch or bulge over a target region between 15 and approximately 29 nt in length, preferably at least 16 nt in length, more preferably 18-20, e.g., 19 nt in length. The region of complementarity may be any subrange or specific value within the interval between 17 and 29, e.g., 17-18, 19-21, 21-23, 19-23, 24-27, 27-29. In other embodiments the antisense strand is substantially complementary to the target region, i.e., one or more mismatches and/or bulges exists in the duplex formed by the antisense strand and a target transcript. The two strands of an siRNA are substantially complementary, preferably 100% complementary to each other within the duplex portion.

[0121] The term “short hairpin RNA” refers to an RNA molecule comprising at least two complementary portions hybridized or capable of hybridizing to form a double-stranded (duplex) structure sufficiently long to mediate RNAi (as described for siRNA duplexes), and at least one single-stranded portion that forms a loop connecting the regions of the shRNA that form the duplex. The structure is also referred to as a stem/loop structure, with the stem being the duplex portion. The structure may further comprise an overhang (e.g., as described for siRNA) on the 5′ or 3′ end. Preferably, the loop is about 1-20, more preferably about 4-10, and most preferably about 6-9 nt long and/or the overhang is about 1-20, and more preferably about 2-15 nt long. The loop may be located at either the 5′ or 3′ end of the region that is complementary to the target transcript whose inhibition is desired (i.e., the antisense portion of the shRNA). In certain embodiments the overhang comprises one or more U residues, e.g., between 1 and 5 Us. As described further below, shRNAs are processed into siRNAs by the conserved cellular RNAi machinery. Thus shRNAs are precursors of siRNAs and are, in general, similarly capable of inhibiting expression of a target transcript that is complementary to a portion of the shRNA (referred to as the antisense or guide strand of the shRNA). In general, the features of the duplex formed between the antisense strand of the shRNA and a target transcript are similar to those of the duplex formed between the guide strand of an siRNA and a target transcript. In certain embodiments of the invention the 5′ end of an shRNA has a phosphate group while in other embodiments it does not. In certain embodiments of the invention the 3′ end of an shRNA has a hydroxyl group while in other embodiments it does not.

[0122] The term “subject”, as used herein, refers to an individual susceptible to infection with a virus, e.g., influenza virus. The term includes birds and animals, e.g., domesticated birds and animals (such as chickens, mammals, including swine, horse, dogs, cats, etc.), and wild animals, non-human primates, and humans.

[0123] An RNAi-inducing agent is considered to be “targeted” to a target transcript for the purposes described herein if (1) the RNAi-inducing agent comprises a strand that is at least 80%, preferably at least about 85%, more preferably at least about 90%, 91%, 92%, 93%, 94%, 95%, 96%, 97%, 98%, 99%, or 100% complementary with the target transcript for a stretch of at least about 15, more preferably at least about 17, yet more preferably at least about 18 or 19 to about 21-23, or 24-29 nucleotides in length; and/or (2) one strand of the RNAi-inducing agent hybridizes to the target transcript. Suitable hybridization conditions are those typically found within the cytoplasm or nucleus of mammalian cells and/or in a Drosophila lysate as described, e.g., in US Pubs. 20020086356 and 20040229266 and in refs 21 and 28. In certain embodiments of the invention a GU or UG base pair in a duplex formed by an antisense strand and a target transcript is not considered a mismatch for purposes of determining whether an RNAi-inducing agent is targeted to the transcript. An RNA-inducing vector whose presence within a cell results in production of an RNAi-inducing agent that is targeted to a transcript is also considered to be targeted to the transcript. An RNAi-inducing agent targeted to a transcript is also considered to target the gene that directs synthesis of the transcript. An RNAi-inducing agent that inhibits expression of a target transcript involved in the production of, replication of, pathogenicity of, and/or infection by a virus is said to inhibit the virus.

[0124] A “target portion” is a region of a target transcript that hybridizes with an antisense strand of an RNAi-inducing agent.

[0125] The term “target transcript” refers to any RNA that is a target for RNAi. Messenger RNA is a preferred target. The terms “target RNA” and “target transcript” are used interchangeably herein.

[0126] As used herein, “treating” includes reversing, alleviating, and/or inhibiting the progress of, the disease, disorder, or condition to which such term applies, and/or reversing, alleviating, and/or inhibiting one or more symptoms or manifestations of such disease, disorder or condition.

[0127] The term “vector” refers to a nucleic acid molecule capable of mediating entry of, e.g., transferring, transporting, etc., a second nucleic acid molecule into a cell. The transferred nucleic acid is generally linked to, e.g., inserted into, the vector nucleic acid molecule. A vector may include sequences that direct autonomous replication, or may include sequences sufficient to allow integration into host cell DNA. Useful vectors include, for example, plasmids (typically DNA molecules although RNA plasmids are also known), cosmids, and viral vectors. As is well known in the art, the term viral vector may refer either to a nucleic acid molecule (e.g., a plasmid) that includes virus-derived nucleic acid elements that typically facilitate transfer or integration of the nucleic acid molecule (examples include retroviral or lentiviral vectors) or to a virus or viral particle that mediates nucleic acid transfer (examples include retroviruses or lentiviruses). As will be evident to one of ordinary skill in the art, viral vectors may include various viral components in addition to nucleic acid(s).

### DETAILED DESCRIPTION OF CERTAIN PREFERRED EMBODIMENTS OF THE INVENTION

[0128] I. Influenza Viral Life Cycle and Characteristics

[0129] Influenza viruses are enveloped, negative-stranded RNA viruses of the Orthomyxoviridae family. They are classified as influenza types A, B, and C, of which influenza A is the most pathogenic and is believed to be the only type able to undergo reassortment with animal strains. Influenza types A, B, and C can be distinguished by differences in their nucleoprotein and matrix proteins (see FIG. 1). As discussed further below, influenza A subtypes are defined by variation in their hemagglutinin (HA) and neuraminidase (NA) genes and usually distinguished by antibodies that bind to the corresponding proteins.

[0130] The influenza A viral genome consists of ten genes distributed in eight RNA segments. The genes encode 10 proteins: the envelope glycoproteins hemagglutinin (HA) and neuraminidase (NA); matrix protein (M1); nucleoprotein (NP); three polymerases (PB1, PB2, and PA) which are components of an RNA-dependent RNA transcriptase also referred to as a polymerase or polymerase complex herein; ion channel protein (M2), and nonstructural proteins (NS1 and NS2). See Julkunen, I., et al., Cytokine and Growth Factor Reviews, 12: 171-180, 2001 for further details regarding the influenza A virus and its molecular pathogenesis. See also Fields, B., et al., Fields' Virology, 4^{th}. ed., Philadelphia: Lippincott Williams and Wilkins; ISBN: 0781718325, 2001. The organization of the influenza B viral genome is extremely similar to that of influenza A while the influenza C viral genome contains seven RNA segments and lacks NA.

[0131] Influenza A virus classification is based on the hemagglutinin (H1-H15) and neuraminidase (N1-N9) genes. World Health Organization (WHO) nomenclature defines each virus strain by its animal host of origin (specified unless human), geographical origin, strain number, year of isolation, and antigenic description of HA and NA. For example, A/Puerto Rico/8/34 (H1N1) designates strain A, isolate 8, that arose in humans in Puerto Rico in 1934 and has antigenic subtypes 1 of HA and NA. As another example, A/Chicken/Hong Kong/258/97 (H5N1) designates strain A, isolate 258, that arose in chickens in Hong Kong in 1997 and has antigenic subtype 5 of HA and 1 of NA. Human epidemics have been caused by viruses with HA types H1, H2, and H3 and NA types N1 and N2.

[0132] As mentioned above, genetic variation occurs by two primary mechanisms in influenza virus A. Genetic drift occurs via point mutations, which often occur at antigenically significant positions due to selective pressure from host immune responses, and genetic shift (also referred to as reassortment), involving substitution of a whole viral genome segment of one subtype by another. Many different types of animal species including humans, swine, birds, horses, aquatic mammals, and others, may become infected with influenza A viruses. Some influenza A viruses are restricted to a particular species and will not normally infect a different species. However, some influenza A viruses may infect several different animal species, principally birds, swine, and humans. This capacity is considered to be responsible for major antigenic shifts in influenza A virus. For example, suppose a swine becomes infected with an influenza A virus from a human and at the same time becomes infected with a different influenza A virus from a duck. When the two different viruses reproduce in the swine cells, the genes of the human strain and duck strain may “mix,” resulting in a new virus with a unique combination of RNA segments. This process is called genetic reassortment.

[0133] Like other viruses, influenza viruses replicate intracellularly. Influenza A viruses replicate in epithelial cells of the respiratory tract. However, monocytes/macrophages and other white blood cells can also be infected. Numerous other cell types with cell surface glycoproteins containing sialic acid, which acts as a viral receptor, are susceptible to infection in vitro.

[0134] The influenza A infection/replication cycle is depicted schematically in FIG. 1. As shown in FIG. 1A, the influenza A virion 100 comprises genome 101, consisting of eight negative stranded RNA segments: PB2 (102), PB1 (103), PA (104), HA (105), NP (106), NA (107), M (108), and NS (109). There are conventionally numbered from 1 to 8, with PB2=1, PB1=2, PA=3, HA=4, NP=5, NA=6, M=7, and NS=8. The genomic RNA segments are packaged inside a layer of membrane protein M1 120 which is surrounded by a lipid bilayer 130 from which the extracellular domains of the envelope glycoproteins HA 140 and NA 150 and the ion channel M2 160 protrude. RNA segments 102-108 are covered with nucleoprotein MP 170 and contain the viral polymerase complex 180 consisting of polymerases PB1, PB2, and PA. Nonstructural protein NS2 190 is also found within virions. Nonstructural protein NS1 (not shown) is found within infected cells.

[0135] FIG. 1B shows the genome structure of the influenza virus and the transcripts generated from the influenza genome (not drawn to scale). Six of the eight genomic RNA segments (PB1 (102), PB2 (103), PA (104), HA (105), NP (106), and NA (107)) each serve as template for a single, unspliced transcript that encodes the corresponding protein. Three mRNA transcripts have been identified as being derived from influenza virus A segment M (108): a colinear transcript 191 that encodes the M₁ protein, a spliced mRNA 192 that encodes the M₂ protein and contains a 689 nucleotide intron, and another alternatively spliced mRNA 193 that has the potential to encode a 9 amino acid peptide (M3) that has not been detected in virus-infected cells. Two mRNA transcripts are derived from influenza virus A segment NS: an unspliced mRNA 194 that encodes the NS₁ protein and a spliced mRNA 195 that encodes the NS₂ protein and includes a 473 nucleotide intron.

[0136] The infective cycle (FIG. 2) begins when the virion 100 attaches via its hemagglutinin to the surface of a susceptible cell. Attached virus is endocytosed into coated vesicles 200 via clathrin-dependent endocytosis. Low pH in endosomes triggers fusion of viral and endosomal membranes, resulting in liberation of viral ribonucleoprotein (vRNP) complexes (nucleocapsids) 210 into the cytoplasm. Viral nucleocapsids are imported into the cell nucleus, following which primary viral mRNA synthesis is initiated by a viral RNA polymerase complex that consists of the PB1, PB2, and PA polymerases. Primers produced by the endonuclease activity of the PB2 protein on host cell pre-mRNA is used to initiate viral mRNA synthesis using viral RNA (vRNA) 220 as a template. PB1 protein catalyzes the synthesis of virus specific mRNAs 230, which are transported into the cytoplasm and translated.

[0137] Newly synthesized polymerases are transported into the nucleus and regulate replication and secondary viral mRNA synthesis. Synthesis of complementary RNA (cRNA) 240 from viral RNA (vRNA) is initiated by PB1, PB2, PA, and NP, after which new vRNA molecules 250 are synthesized. The viral polymerase complex uses these vRNAs as templates for synthesis of secondary mRNA 260. Thus transcription of vRNA by the virus-encoded transcriptase produces mRNA that serves as a template for synthesis of viral proteins and also produces complementary RNA (cRNA), which serves as a template for synthesizing more vRNA for new virion production. Viral mRNAs are transported into the cytoplasm, where viral structural proteins 270 are produced. Proteins PB1, PB2, PA, and NP are transported into the nucleus, the site of assembly of vRNP complexes (nucleocapsids) 280. Budding and release of viral particles occur at the plasma membrane.

[0138] Influenza A virus replicates rapidly in cells, resulting in host cell death due to cytolytic effects or apoptosis. Infection causes changes in a wide variety of cellular activities and processes including inhibition of host cell gene expression. The viral polymerase complex binds to and cleaves newly synthesized cellular polymerase II transcripts in the nucleus. NS1 protein blocks cellular pre-mRNA splicing and inhibits nuclear export of host mRNA. Translation of cellular mRNA is greatly inhibited, whereas viral mRNA is efficiently translated. Maintenance of efficient translation of viral mRNAs is achieved in part through viral downregulation of the cellular interferon (IFN) response, a host response which typically acts to inhibit translation in virally infected cells. In particular, viral NS1 protein binds to IFN-induced PKR and inhibits its activity. Thus it is evident that infection with influenza virus results in profound changes in cellular biosynthesis, including changes in the processing and translation of cellular mRNA.

[0139] II. Selection, Design, and Synthesis of RNAi-Inducing Entities

[0140] A. Selection and Design of RNAi-Inducing Entities

[0141] The present invention provides RNAi-inducing entities targeted to one or more influenza virus transcripts. Various viral RNA transcripts (primary and secondary vRNA, primary and secondary viral mRNA, and viral cRNA) are present in cells infected with influenza virus and play important roles in the viral life cycle. Any of these transcripts are appropriate targets for RNAi mediated inhibition by either a direct or an indirect mechanism in accordance with the present invention. Preferred RNAi-inducing entities that target any viral mRNA transcript will specifically reduce the level of the transcript itself in a direct manner, e.g., by causing degradation of the transcript. In addition, RNAi-inducing agents that target certain influenza virus transcripts (e.g., NP, PA, PB1) will indirectly cause reduction in the levels of influenza virus transcripts to which they are not specifically targeted.

[0142] Viral transcripts that may serve as a target for RNAi based therapy according to the present invention include, for example, 1) any influenza virus genomic segment; 2) transcripts that encode any viral proteins including transcripts encoding the proteins PB1, PB2, PA, NP, NS1, NS2, M1, M2, HA, or NA. Transcripts may be targeted in their vRNA, cRNA, and/or mRNA form(s) by a single RNAi-inducing agent, although the inventors have obtained data suggesting that viral mRNA is the sole or primary target of RNAi. In particularly preferred embodiments the target transcript encodes influenza virus protein NP, PA, PB1, or PB2.

[0143] General features of RNAi-inducing agents are known in the art. RNA interference was initially recognized as a phenomenon in which the presence of long dsRNA (typically hundreds of nt) in a cell leads to sequence-specific degradation of mRNA containing a region complementary to one strand of the dsRNA (U.S. Pat. No. 6,506,559). siRNAs were first discovered in studies of RNAi in Drosophila, as described in WO 01/75164 and U.S. Pub. Nos. 20020086356 and 20030108923. In particular, it was found that, in Drosophila, long dsRNAs are processed by an RNase III-like enzyme called Dicer (Bernstein et al., Nature 409:363, 2001) into smaller dsRNAs comprised of two 21 nt strands, each of which has a 5′ phosphate group and a 3′ hydroxyl, and includes a 19 nt region precisely complementary with the other strand, so that there is a 19 nt duplex region flanked by 2 nt-3′ overhangs. FIG. 3 shows a schematic diagram of siRNAs found in Drosophila. The structure includes a 19 nucleotide double-stranded (DS) portion 300, comprising a sense strand 310 and an antisense strand 315. Each strand has a 2 nt 3′ overhang 320.

[0144] These short dsRNAs (siRNAs) act to silence expression of any gene that includes a region complementary to one of the dsRNA strands, presumably because a helicase activity unwinds the 19 bp duplex in the siRNA, allowing an alternative duplex to form between one strand of the siRNA (the “antisense” or “guide” strand) and the target transcript. The antisense strand is incorporated into an endonuclease complex, RISC, which is guided to the complementary target RNA. An enzymatic activity present in RISC cleaves (“slices”) at a single location, producing unprotected RNA ends that are promptly degraded by cellular machinery (FIG. 4). As mentioned below, additional mechanisms of silencing mediated by short RNA species (microRNAs) are also known (see, e.g., Ruvkun, G., Science, 294, 797-799, 2001; Zeng, Y., et al., Molecular Cell, 9, 1-20, 2002). It is noted that the discussion of mechanisms and the figures depicting them are not intended to suggest any limitations on the mechanism of RNA inteference employed in the present invention.

[0145] Homologs of the Dicer enzyme are found in diverse species ranging from C. elegans to humans (Sharp, Genes Dev. 15;485, 2001; Zamore, Nat. Struct. Biol. 8:746, 2001), raising the possibility that an RNAi-like mechanism might be able to silence gene expression in a variety of different cell types including mammalian, or even human, cells. However, long dsRNAs (e.g., dsRNAs having a double-stranded region longer than about 30-50 nucleotides) are known to activate the interferon response in mammalian cells. Thus, rather than achieving the specific gene silencing observed with the Drosophila RNAi mechanism, the presence of long dsRNAs in mammalian cells would be expected to lead to interferon-mediated non-specific suppression of translation, potentially resulting in cell death. Long dsRNAs are therefore not thought to be useful for inhibiting expression of particular genes in mammalian cells.

[0146] However, the inventors and others have found that siRNAs, when introduced into mammalian cells, can effectively reduce the expression of target genes, including viral genes. The inventors have found that a significant proportion of the sequences selected using a first set of design parameters described herein proved to be efficient suppressing sequences when included in an siRNA or shRNA and tested as described below and in co-pending patent application U.S. Ser. No. 10/674,159. Approximately 15% of siRNAs from an initially designed set (Example 1) showed a strong effect and potently inhibited virus production in cells infected with either PR8 or WSN strains of influenza virus; approximately 40% showed a significant effect (i.e., a statistically significant difference (p≦0.05) between virus production in the presence versus the absence of siRNA in cells infected with PR8 and/or in cells infected with WSN); approximately 45% showed no or minimal effect.

[0147] In particular, RNAs targeted to genes that encode the RNA-dependent RNA transcriptase and nucleoprotein NP, dramatically reduced the level of virus produced in infected mammalian cells (Examples 2, 4, 5, 6). The inventors have also shown that siRNAs targeted to influenza virus transcripts can inhibit influenza virus replication in vivo in intact organisms, namely chicken embryos infected with influenza virus (Example 3). In addition, the inventors have demonstrated that siRNAs targeted to influenza virus transcripts can inhibit virus production in mice when administered either before or after viral infection (Examples 12, 14, 16, 23-26, etc.). Furthermore, the inventors have shown that administration of a DNA vector from which siRNA precursors (shRNAs) can be expressed inhibits influenza virus production in mice. Additional effective RNAi-inducing agents, including a number of siRNAs that were highly effective when tested for their ability to inhibit influenza virus production in cells and/or mice, were designed using a second set of design criteria. Thus, the present invention demonstrates that treatment with RNAi agents such as siRNA, shRNA, or with vectors whose presence within a cell leads to expression of such agents are effective strategies for inhibiting infection and/or replication by a respiratory virus, e.g., influenza virus. Two of the highly effective siRNAs were subsequently tested against highly pathogenic avian influenza virus strains, and were shown to inhibit them, confirming their ability to inhibit a broad range of influenza virus strains (Tompkins, et al., Proc. Natl. Acad. Sci., 101(23):8682-6, 2004). Thus the invention provides RNAi-inducing agents that inhibit virus production in cells infected with any of multiple different influenza virus strains.

[0148] While not wishing to be bound by any theory, the inventors suggest that these findings are especially significant in view of the profound changes in cellular activities, e.g., metabolic and biosynthetic activities, that take place upon infection with influenza virus. Infection with influenza virus inhibits such fundamental cellular processes as cellular mRNA splicing, transport, and translation and results in inhibition of cellular protein synthesis. Despite these alterations, the finding that RNAi-inducing agents targeted to influenza viral transcripts inhibits viral replication suggests that the cellular mechanisms underlying the RNAi-mediated inhibition of gene expression continue to operate in cells infected with influenza virus at a level sufficient to inhibit influenza gene expression.

[0149] For any particular gene target that is selected, the design of RNAi-inducing agents for use in accordance with the present invention will preferably follow certain guidelines. In general, it is desirable to target sequences that are specific to the virus (as compared with the host), and that, preferably, are important or essential for viral function. Thus it is desirable to avoid sections of target transcript that may be shared with other transcripts whose degradation is not desired. A database search may be performed to determine whether either strand is substantially complementary to any sequence in the genome of an organism (e.g., a human) to which the agent is to be delivered, and such sequences may be avoided. As described herein, portions of the viral transcript that are conserved among multiple variants are preferred targets.

[0150] Preferred RNAi-inducing agents for use in accordance with the present invention include a base-paired region between 15 and approximately 29 nt long, e.g., approximately 19 nt in length, and may optionally have one or more free or looped ends. FIG. 5 presents various structures that could be utilized as an RNAi-inducing agent according to the present invention. FIG. 5A shows the structure found to be active in the Drosophila system described above and in mammalian cells. The present invention encompasses administration of an siRNA having the structure depicted in Figure SA to mammalian cells in order to treat or prevent influenza infection. However, it is not required that the administered agent have this structure. For example, the administered composition may include any structure capable of being processed in vivo to the structure of FIG. 5A, so long as the administered agent does not cause undesired or deleterious events such as induction of the interferon response. The invention may also comprise administration of agents that are not processed to precisely the structure depicted in Figure SA, so long as administration of such agents reduces viral transcript levels sufficiently as discussed herein. In some cases, the agent that is delivered to a cell according to the present invention may undergo one or more processing steps before becoming an active suppressing agent (see below for further discussion); in such cases, those of ordinary skill in the art will appreciate that the relevant agent will preferably be designed to include sequences that may be necessary for its processing.

[0151] FIGS. 5B and 5C represent additional structures that may be used to mediate RNAi. These hairpin (stem-loop) structures may function directly as inhibitory RNAs or may be processed intracellularly (e.g., by Dicer) to yield an siRNA structure such as that depicted in FIG. 5A. FIG. 5B shows an agent comprising an RNA molecule containing two complementary regions that hybridize to one another to form a duplex region represented as stem 400, a loop 410, and an overhang 320. Such molecules are said to self-hybridize, and a structure of this sort is referred to as an shRNA. See also FIGS. 20 and 21 for examples of shRNA structures. FIG. 5C shows an agent comprising an RNA circle that includes complementary elements sufficient to form a stem 400 approximately 19 bp long. Such an agent may show improved stability as compared with various other siRNAs described herein.

[0152] In describing RNAi-inducing agents and their activities it will frequently be convenient to refer to the agent as having two strands, as in the case of siRNAs. In general, the sequence of the duplex portion of one strand of the RNAi-inducing agent is substantially complementary to the target transcript in this region. The sequence of the duplex portion of the other strand of the RNAi-inducing agent is typically substantially identical to the targeted portion of the target transcript. The strand comprising the portion complementary to the target is referred to as the “antisense strand”, while the other strand is often referred to as the “sense strand”. The portion of the antisense strand that is complementary to the target may be referred to as the “inhibitory region”.

[0153] The duplex structure of an shRNA may be considered to comprise antisense and sense strands, where the antisense strand is a first portion of the molecule that forms or is capable of forming a duplex with a second portion of the molecule and is complementary to the targeted portion of the target transcript. The sense strand is the portion of the molecule which forms or is capable of forming a duplex with the first portion. One skilled in the art will appreciate that an “antisense strand” that targets a vRNA strand from a negative-strand RNA virus will be antisense to the vRNA, but be a “sense strand” relative to the viral cRNA. Likewise, an “antisense strand” that targets a cRNA strand from a negative-strand RNA virus will be antisense to the cRNA, but be a “sense strand” relative to the vRNA sequence.

[0154] For purposes of description, the discussion below will frequently refer to siRNA. However, as will be evident to one of ordinary skill in the art, teachings relevant to the two strands of an siRNA are generally applicable to the sense and antisense strands of the stem portion of any RNAi-inducing agent, e.g., a corresponding shRNA that can be processed intracellularly to yield an siRNA. Thus in general the considerations below apply also to the design, selection, and delivery of inventive RNAi-inducing agents such as shRNAs that are processed intracellularly to yield RNAs that mediate target cleavage or translational repression.

[0155] In general, preferred siRNA antisense strands hybridize with a target site that comprises or consists of exonic sequences in the target transcript. In certain embodiments of the invention the antisense strand hybridizes to a 5′ or 3′ untranslated region. In general, any site that is available for hybridization with a antisense strand, resulting in slicing and degradation and/or translational repression of the transcript may be utilized.

[0156] RNAi-inducing agents may be selected according to a variety of approaches. In general, as mentioned above, inventive RNAi-inducing agents preferably include a region (the “duplex region”), one strand of which contains an inhibitory region between 15-29 nt in length that is sufficiently complementary to a portion of the target transcript (the “target portion”), so that a hybrid can form in vivo between this strand and the target transcript. This duplex region, also referred to as the “core region” is understood not to include overhangs. Overhangs, if present, may, but need not be, complementary to the target transcript. Preferably, this duplex region includes most or all of the double-stranded structure depicted in FIGS. 3, 4, and 5.

[0157] Preferably the inhibitory region is 100% complementary to the target. However, one of ordinary skill in the art will recognize that mismatches and bulges may exist in a duplex formed by an antisense strand and the target. Thus the inhibitory region need only be sufficiently complementary to the target such that hybridization can occur, e.g., under physiological conditions in a cell and/or in an in vitro system that supports RNAi, such as the Drosophila extract system mentioned above. Preferably the inhibitory region and the target are at least 70%, more preferably at least 80%, more preferably at least 90%, and most preferably 100% complementary to each other. Preferably fewer than six residues or alternatively about 20%, e.g., 1, 2, 3, 4, of antisense strand residues in this region are mismatched with the target over a window of 15-29 nt, e.g., 19 nt. Preferably fewer than 4 residues or alternatively about 15% of antisense strand residues in this region are mismatched with the target. Preferably only 1 or 2 mismatches is present. One or more (or all) of the mismatches may be a U-G mismatch. For example, if the inhibitory region is 15-16 nt long, there may be 0-3 mismatches; if the inhibitory region is 17 nt long there may be 0-4 mismatches; if the inhibitory region is 18 nt long, there may be 0-5 mismatches; if the inhibitory region is 19 nt long, there may be 0-6 mismatches. The number of permissible mismatches increases by one nt for each additional nt present in the inhibitory region up to the upper limit of the inhibitory region of an RNAi-inducing agent, e.g., a length of approximately 30 nt. In certain embodiments the mismatches are not at continuous positions. In certain embodiments there is no stretch of mismatches longer than two nt in length. In preferred embodiments a window of evaluation of 15-19 nt contains 0-1 mismatch (preferably 0), and a window of evaluation of 20-29 nt contains 0-2 mismatches (preferably 0-1, more preferably 0). One of skill in the art will recognize that duplex structures interrupted by bulges will typically allow a greater number of unpaired nt. One of skill in the art will also recognize that it may be preferable to avoid mismatches in the central portion of the antisense strand/target RNA duplex (see, e.g., Elbashir et al., EMBO J. 20:6877, 2001). For example, the 3′ nucleotides of the antisense strand of the siRNA often do not contribute significantly to specificity of the target recognition and may be less critical for target cleavage. In certain embodiments the antisense strand and the target are complementary at position 10 of the inhibitory region of the antisense strand. In other embodiments they are not.

[0158] Certain RNAi-inducing agents contain a strand that hybridizes to a target site that includes or consists entirely of 3′ UTR sequences. One of ordinary skill in the art will appreciate that the resulting duplexes may tolerate a larger number of mismatches and/or bulges, particularly mismatches within the central region of the duplex while still leading to effective silencing. For example, one or both strands may include one or more “extra” nucleotides that form a bulge as shown in FIG. 6. One or more bulges of; e.g., 5-10 nt long, may be present. Typically the stretches of perfect complementarity are at least 5 nt in length, e.g., 6, 7, or more nt, while the regions of mismatch may be, for example, 1, 2, 3, or 4 nt in length. The duplexes frequently include two stretches of perfect complementarity separated by a region of mismatch. A variety of structures are possible. For example, there may be multiple areas of mismatch.

[0159] Some mismatches may be desirable, as duplex formation in the 3′ UTR or elsewhere may inhibit expression of a protein encoded by the transcript by a mechanism related to, but distinct from, the cleavage that is the hallmark of classic RNA inhibition. As shown in FIG. 6, the Dicer enzyme that generates siRNAs in the Drosophila system discussed above and also in a variety of organisms, is known to also process a small, temporal RNA (stRNA) substrate into an inhibitory agent that, when bound within the 3′ UTR of a target transcript, blocks translation of the transcript (see Grishok, A., et al., Cell 106, 23-24, 2001; Hutvagner, G., et al., Science, 293, 834-838, 2001; Ketting, R., et al., Genes Dev., 15, 2654-2659). Subsequent discoveries have shown that the genomes of organisms ranging from C. elegans to mammals encodes a class of short (˜19-25 nucleotide) RNAs known as microRNAs (miRNAs) that inhibit translation of endogenous mRNAs to which they are partially complementary. MicroRNAs are discussed in Bartel, D P., Cell, 116(2):281-97, 2004; Novina, C. and Sharp, P A, Nature, 430:161-164, 2004; and US Pub. No. 20050059005. An miRNA binds to target mRNA transcripts at partially complementary sites and prevents their translation. RNAi-inducing agents having the structure of siRNAs (two individual short strands hybridized to one another) can act in a manner similar to miRNAs, i.e., by reducing translation of the transcript rather than decreasing its stability (Doench, J G, et al. Genes & Development, 17:438-442, 2003). It is believed that such siRNAs are processed intracellularly to give rise to single-stranded RNAs that act via the miRNA translational repression pathway. For the purposes of the present invention, any partly or fully double-stranded short RNA as described herein, one strand of which binds to a target transcript and reduces its expression (i.e., reduces the level of the transcript and/or reduces synthesis of the polypeptide encoded by the transcript) is considered to be an RNAi-inducing agent, regardless of whether it acts by triggering degradation, inhibiting translation, or by other means. In addition any precursor RNA structure that may be processed in vivo (i.e., within a cell or organism) to generate such an RNAi-inducing agent is useful in the present invention.

[0160] In some cases the sequence of an RNAi-inducing agent is selected such that the entire antisense strand (including the 3′ overhang if present) is perfectly complementary to the target transcript. However, it is not necessary that overhang(s) are either complementary or identical to the target transcript. Any desired sequence (e.g., UU) may simply be appended to the 3′ ends of antisense and/or sense core regions to generate 3′ overhangs. In general, overhangs containing one or more pyrimidines, usually U, T, or dT, are employed. When synthesizing RNAi-inducing agents it may be more convenient to use T rather than U in the overhang(s). Use of dT rather than T may confer increased stability.

[0161] Preferably the strands of an RNAi-inducing agent are 100% complementary to each other within the core region. However, one of ordinary skill in the art will recognize that mismatches and bulges may exist in a duplex formed by an antisense and sense strand. The strands need only be sufficiently complementary to one another such that hybridization can occur, e.g., under physiological conditions in a cell and/or in an in vitro system that supports RNAi, such as the Drosophila extract system mentioned above. Preferably the two strands of an RNAi-inducing agent are substantially complementary within the core region, e.g., at least 70%, more preferably at least 80%, more preferably at least 90%, and most preferably 100% complementary to each other within the core region. For example, a core region 15-16 nt long may contain 0-3 mismatches; a core region 17 nt long may contain 0-4 mismatches; a core region 18 nt long may contain 0-5 mismatches; a core region 19 nt long may contain 0-6 mismatches. The number of permissible mismatches increases by one nt for each additional nt present in the inhibitory region up to the upper limit of the core region of an RNAi-inducing agent, e.g., a length of approximately 30 nt. In preferred embodiments a core region of 15-19 nt contains 0-1 mismatch (preferably 0), and a core region of 20-29 nt contains 0-2 mismatches (preferably 0-1, more preferably 0). One of skill in the art will recognize that duplex structures interrupted by bulges will typically allow a greater number of unpaired nt.

[0162] In summary, an RNAi-inducing agent may be designed by selecting a target portion and designing an RNAi-inducing agent comprising an antisense strand whose sequence is sufficiently complementary to hybridize to the target, e.g., substantially complementary or 100% complementary to the target transcript over 15-29 nucleotides, e.g., 19 nucleotides, and a sense strand whose sequence is sufficiently complementary to hybridize to the antisense strand, e.g., substantially or, preferably, 100% complementary to the antisense strand. 3′ overhangs such as those described above may then be added to these sequences to generate an siRNA structure.

[0163] One of ordinary skill in the art will appreciate that RNAi-inducing agents such as siRNAs may exhibit a range of melting temperatures (Tm) in accordance with the foregoing principles. The Tm is defined as the temperature at which 50% of a nucleic acid and its perfect complement are in duplex in solution. Representative examples of acceptable Tms may readily be determined using methods well known in the art, either experimentally or using appropriate empirically or theoretically derived equations, based on the siRNA sequences disclosed in the Examples herein. In certain embodiments of the invention the calculated Tm of a duplex formed by an antisense strand and a target transcript is up to 5° C. lower, up to 10° C. lower, or up to 15° C. lower than the calculated Tm of a duplex that would be formed between the target and an antisense strand having an inhibitory region that is perfectly complementary to the target. In certain embodiments of the invention the calculated Tm of a duplex formed by the antisense strand and the sense strand of an RNAi-inducing agent is up to 5° C. lower, or up to 10° C. lower, or up to 15° C. lower than the calculated Tm of a duplex that would be formed between antisense and sense strands that are perfectly complementary (optionally excluding overhangs).

[0164] One of ordinary skill in the art will be able to calculate Tm values. Several studies have derived accurate equations for Tm using thermodynamic basis sets for nearest neighbor interactions. Values for thermodynamic parameters are available in the literature. For RNA see Freier, S. M., et al., Proc. Natl. Acad. Sci. 83, 9373-9377, 1986. Rychlik, W., et al., Nucl. Acids Res. 18(21), 6409-6412, 1990. Preferably the more recent values and methods in Walter, A. E., Proc. Natl. Acad. Sci., 91, 9218-9222, 1994, or more preferably those in Mathews, D H, J. Mol. Biol., 288, 911-940, 1999, are used. Computer programs for calculating Tm are widely available. See, e.g., the Web site having URL www.basic.nwu.edu/biotools/oligocalc.html. Preferably a program for calculating relevant parameters such as ΔG and Tm, available on the mfold web server at the URL www.bioinfo.rpi.edu/applications/mfold, as described in Zuker, M., Nucl. Acids. Res., 31(13), 2003 is used.

[0165] One aspect of the present invention is the recognition that when multiple strains, subtypes, etc. (referred to collectively as variants), of an infectious agent exist, whose genomes vary in sequence, it will often be desirable to select and/or design RNAi-inducing agents that target regions that are highly conserved among different variants. By comparing a sufficient number of sequences and selecting highly conserved regions, it is possible to target multiple variants with a single RNAi-inducing agent targeted to such a highly conserved region, e.g., the antisense strand of the agent is substantially complementary to the highly conserved region over a sufficient length such that the RNAi-inducing agent mediates RNAi. According to certain embodiments of the invention a region is highly conserved among multiple variants if it is identical among the variants. According to certain embodiments of the invention a region targeted by the RNAi-inducing agent, e.g., a region of 15-29 nucleotides, preferably 19 nucleotides, is highly conserved if it differs by at most one nucleotide (i.e., at 0 or 1 nucleotide positions) among the variants. According to certain embodiments of the invention such a region is highly conserved among multiple variants if it differs by at most two nucleotides (i.e., at 0, 1, or 2 nucleotide positions) among the variants. According to certain embodiments of the invention a region is highly conserved among multiple variants if it differs by at most three nucleotides or (i.e., at 0, 1, 2, or 3 nucleotide positions) among the variants. According to certain embodiments of the invention an RNAi-inducing agent is targeted to a region that is highly conserved among at least 5, 10, 15, 20, 25, 30, 40, 50, or more variants.

[0166] In order to identify regions that are highly conserved among a set of multiple variants, the following procedure may be used. One member of the set of sequences is selected as the base sequence, i.e., the sequence to which other sequences are to be compared. According to different embodiments of the invention the base sequence may either be one of the sequences in the set being compared or may be a consensus sequence derived from sequences in the set, e.g., by determining for each position the most frequently found nucleotide at that position among the sequences in the set.

[0167] Having selected a base sequence, the sequence of each member of the set of multiple variants is compared with the base sequence. The number of differences between the base sequence and any member of the set of multiple variants over a region of the sequence (e.g., a region of 15-29 nucleotides, such as 19 nucleotides) is used to determine whether the particular region of interest is highly conserved between the base sequence and the member of the set to which it is being compared. As noted above, in various embodiments of the invention if the number of positions at which the sequence differs between two regions is either 0; 0 or 1; 0, 1, or 2; or 0, 1, 2, or 3, the regions are considered highly conserved. The antisense sequence of the RNAi-inducing agent may be selected to be complementary to the base sequence across a highly conserved region of 15-29 nucleotides, e.g., 19 nucleotides, or may be selected to be complementary to one of the other sequences across the highly conserved region. Typically, the sense strand sequence is selected to be identical to the base sequence or to one of the other sequences across the highly conserved region, such that the antisense strand and the sense strand are 100% complementary to each other within the duplex portion of the RNAi-inducing agent.

[0168] Generally the antisense strand sequence is selected with reference to the base sequence as described above. However in certain embodiments of the invention, particularly if a nucleotide present at a particular position in a second sequence in the set being compared is found in more of the sequences being compared than the correspondingly positioned nucleotide in the base sequence, then the antisense strand sequence may be selected with reference to the second sequence (e.g., 100% complementary to the highly conserved region present in the second sequence). In addition according to certain embodiments of the invention, if the consensus nucleotide (most commonly occurring nucleotide) at the position where the difference occurs is different to that found in the base sequence, the consensus nucleotide may be used. Note that this may result in a sequence that is not identical to any of the sequences being compared (as may the use of a consensus sequence as the base sequence).

[0169] Example 1 describes the selection of highly conserved target portions based on comparison of a set of sequences from six influenza A strains having a human host of origin and comparison of a set of sequences from seven influenza A strains having different animal hosts of origin (including human) and the design of siRNA sequences that target these portions. Different methods of selecting highly conserved regions may be used. The invention encompasses RNAi-inducing agents whose duplex portions (and, optionally, any overhangs) are selected based on highly conserved regions that meet the criteria provided herein, regardless of how the highly conserved regions are selected. It is also to be understood that the invention encompasses RNAi-inducing agents targeted to portions of influenza virus transcripts that do not meet the criteria for preferred target regions described herein. For example, RNAi-inducing agents that are not targeted to highly or favorably conserved target portions may still be effective inhibitors of influenza virus production for certain strains. Less effective RNAi-inducing entities may also be used for evaluating target specificity, identifying determinants of RNAi efficacy, improving RNAi design, etc.

[0170] Table 1A lists 21-nucleotide regions that are highly conserved among a set of influenza virus sequences for each of the viral gene segments. Each sequence listed in Table 1A includes a 19 nt region (nt 3-21) and an initial 2 nt sequence that is not present in the sense strand of the corresponding siRNA but is complementary to the 3′ overhang of the antisense strand of the siRNA. It will be appreciated that the 19 nt region may be used as the sense strand to design a variety of siRNA molecules having different 3′ overhangs in either or both the sense and antisense strands. Thus a variety of sense and antisense siRNA sequences may be obtained from each sequence listed in Table 1A. Twenty such siRNA sequences are listed in Table 2.

[0171] Table 1B lists additional siRNAs designed based on highly conserved regions of influenza virus. Both strands are shown in a 5′ to 3′ direction. A dTdT 3′ overhang is appended to each strand. Nucleotides 1 to 19 in each of the sense strand sequences listed in Table 1B has an identical sequence to a highly conserved region of an influenza virus transcript. The corresponding antisense sequence is complementary to the sense strand. In certain embodiments of the invention, a “highly conserved region” refers to nt 3-21 in any of the sequences listed in Table 1A or nt 1-19 of any of the sense strands listed in Table 1B. These regions are present in double-stranded form in certain of the inventive RNAi-inducing agents, so that the antisense strand of the agent is targeted to the highly conserved portion. The sequences of these regions are referred to as “highly conserved sequences” or “highly conserved target portions”.

[0172] Selection of highly conserved target portions represents one approach to the design of RNAi-inducing entities that will successfully inhibit multiple different influenza virus strains. However, the present invention also provides alternative methods for selecting preferred target portions that are favorably conserved so as to enhance the likelihood that an RNAi-inducing agent targeted to the target portion will inhibit expression of a target transcript in a plurality of different strains that differ in sequence within the target portion. According to the invention, if a target portion is favorably conserved, an RNAi-inducing agent whose antisense strand comprises an inhibitory region that is 100% complementary to the target portion as found in one or more strains (e.g., PR8), preferably inhibits expression of the corresponding transcript that is present in one or more other strains in which the corresponding target portion is less than 100% complementary to the inhibitory region of the antisense strand.

[0173] The invention provides a variety of RNAi-inducing agents that target a favorably conserved portion of an influenza A virus transcript, wherein the favorably conserved target portion is selected according to the inventive methods. In certain embodiments of the invention the target portions are favorably conserved across a plurality of influenza A virus strains isolated from humans. In certain embodiments of the invention the portions are favorably conserved across a plurality of influenza A virus strains isolated from animals other than humans, e.g., avians. In certain embodiments of the invention the portions are favorably conserved across a plurality of influenza A virus strains isolated from humans and also across a plurality of influenza A virus strains isolated from non-human animals, e.g., avians. For example, the portions may be favorably conserved among at least 5, 10, 15, 20, or more variants of human and/or animal origin. In certain embodiments of the invention a target portion is both favorably and highly conserved.

[0174] For any virus target, favorably conserved target portions may be identified by first aligning transcript sequences from a plurality of variants and comparing them with a selected base sequence to identify differences, i.e., positions at which the identity of a nucleotide in one or more of the sequences differs from that in the base sequence. The nature of the difference is evaluated to determine whether it is significant. When discussing a set of sequences that are aligned and compared in order to select conserved regions, a “difference” refers to a position at which one or more of the sequences differs from the base sequence, regardless of how many of the sequences differ from the base sequence. The base sequence can be selected in various ways. For example, it may be convenient to select a sequence from a strain that is highly prevalent or that is readily usable in a laboratory setting.

[0175] Favorably conserved target portions meet the following criteria when corresponding target portions present in the variants in the set are compared: (1) An A to G or C to U difference between the base sequence and a corresponding sequence is allowed at any position; (2) A G to A or C to A difference between the base sequence and a corresponding sequence is allowed only at one or more of positions 1, 18, and 19; (3) There are 0, 1, 2, or 3 differences between the base sequence and a corresponding sequence between positions 1 and 9; (4) There are no more than 2 consecutive differences between the base sequence and a corresponding sequence; and (5) There is at most 1 difference between the base sequence and a corresponding sequence between positions 11 and 17. Any strain may be selected as the base strain. Preferably at least 5 variants are compared to identify a favorably conserved target portion.

[0176] Influenza viruses circulating in avians and/or other animal hosts sometimes gain the capability of infecting humans. Such strains frequently result in a high mortality rate, possibly in part due to a lack of immunity among humans. Examples include the 1918 pandemic and deaths caused by infection of humans with avian influenza in Hong Kong (1997) and Vietnam (2004). Concern regarding the potential spread of strains with an avian or other animal host of origin into the human population is growing, and existing vaccines are not able to protect humans from avian or swine flu virus infection. The invention identifies favorably and/or highly conserved target portions across a plurality of strains originally isolated from humans (human derived strains) and strains originally isolated from non-human animals such as avians (avian derived strains) and provides RNAi-inducing agents targeted to such target portions. Such RNAi-inducing agents are capable of protecting against a wide variety of influenza virus strains, including both human-derived strains and strains derived from non-human animal hosts.

[0177] Example 17 describes identification of influenza transcript target portions that are favorably conserved targets for RNAi. The first step was to identify all potential 19 nucleotide influenza virus target portions. The sequence of each 19 nucleotide potential target portion as found in PR8 or in another influenza virus strain listed in Tables 15A-15H or Tables 19A-19F is considered to be listed herein although they are are not specifically set forth. They may readily be identified by reference to the sequences of influenza virus segments in FIGS. 32A-32J.

[0178] The next step was to identify preferred functional target portions for RNAi, i.e., regions of the gene whose sequence characteristics suggest that an RNAi-inducing agent having an antisense strand that hybridizes to the target will effectively inhibit its expression. The preferred functional target portions meet various criteria with respect to GC content and the absence of continuous stretches of G or C residues. Table 17 (FIG. 33) lists sequences of preferred functional target portions as present in base strain PR8.

[0179] To identify favorably conserved target portions, corresponding functional target portions as found in a large number of human-derived influenza virus strains were then aligned. In general, “Corresponding target portions” in different strains are generally present at about the same position in the genome of the different strains when the genomic sequences are aligned to achieve maximum identity and/or are homologous, e.g., at least 50% identical in the different strains. Typically the degree of identity of corresponding target portions when two strains are compared is at least 60%, 70%, 80%, or more. For example, a corresponding target portion may differ from a target portion found in a base strain at 1, 2, 3, or 4 positions. The exact sequences of these preferred homologous target portions are readily identified by accessing the relevant influenza virus segment sequence in a database such as GenBank, aligning it with the base strain sequence, and locating a portion that is at about the same nucleotide position and/or at least 80% identical, preferably at least 90% identical to a target portion that is found in a base strain, e.g., PR8. Homologous target portions are an aspect of this invention. The criteria described above were used to select favorably conserved target portions. Table 18 (FIG. 34) lists sequences of target portions that are favorably conserved among influenza strains derived from humans, as present in base strain PR8.

[0180] In addition to considering strains isolated from human hosts, strains isolated from avian hosts were aligned and compared in order to identify target portions that are favorably and/or highly conserved both among isolates from human hosts and isolates from avian hosts. Isolates from one or more other animal hosts could also be used for such comparisons. The favorably conserved target portions of the base sequence were compared with the aligned avian sequences, and favorably conserved target portions were selected using the same criteria that were used to identify favorably conserved target portions among the human isolates. Table 20 (FIG. 35) lists sequences of target portions that are favorably conserved among influenza strains derived from humans and avians, as present in base strain PR8.

[0181] Each 19 nucleotide potential target portion as found in PR8 or in another influenza virus strain listed in Tables 15A-15H or Tables 19A-19F is an aspect of this invention. Each preferred functional target portion as found in PR8 or in another influenza virus strain listed in Tables 15A-15H or Tables 19A-19F is an aspect of this invention. Each favorably and/or highly conserved target portion as found in PR8 or in another influenza virus strain listed in Tables 15A-15H or Tables 19A-19F is an aspect of this invention. The complement of each such sequence (i.e., potential, preferred functional, favorably conserved among human derived strains, favorably conserved among human derived strains and avian derived strains, and/or highly conserved among humans or avians or both) can serve as the sequence for the inhibitory region of the antisense strand of an RNAi-inducing agent targeted to the target portion. RNAi-inducing agents having antisense strands that comprise each of these sequences, or fragments of them at least 15 nucleotides in length, are an aspect of this invention. However, a variety of RNAi-inducing agents containing antisense strands that display less than perfect complementarity to the target portion or that are shorter or longer can also be used, as described herein. The sequence of a target portion can serve as the sense strand of an RNAi-inducing agent. Sense strands that are not perfectly complementary to the antisense strand can also be used as described herein.

[0182] As mentioned above, the target portions listed in Tables 17, 18, and 20 are identical to portions of influenza A virus PR8 transcripts. Corresponding target portions for each transcript, which are either identical to or highly homologous to the target portions listed in Tables 17, 18, and 20 are found in other influenza virus A strains. In certain embodiments of the invention the inhibitory region of an antisense strand strand of an RNAi-inducing agent targeted to a potential influenza virus target portion, e.g., a target portion listed in Table 17, 18, or 20 is not 100% complementary to a PR8 sequence but is 100% complementary to a corresponding target portion found in one or more of the other strains listed in Tables 15A-15H or Tables 19A-19F. The present invention provides RNAi-inducing entities, e.g., RNAi-inducing agents such as siRNA or shRNA targeted to each of the potential target portions, functional target portions, favorably conserved portions, and highly conserved target portions described herein. The invention also provides RNAi-inducing entities, e.g., RNAi-inducing agents such as siRNA or shRNA, targeted to target portions that comprise at least 15 continuous nt of a potential target portion, functional target portion, favorably conserved portion, or highly conserved target portion described herein. The invention also provides RNAi-inducing entities e.g., RNAi-inducing agents such as siRNA or shRNA, targeted to target portions up to approximately 29 nt in length that comprise a potential target portion, functional target portion, favorably conserved portion, or highly conserved target portion described herein. The additional nucleotides of the target portion are preferably located immediately 5′ and/or or 3′ from a 19 nt target portion listed herein. In other words, some of the additional up to approximately 10 nt of these longer target portions may be upstream of the 19 nt target portion, and some may be downstream of the 19 nt target portion. The exact sequences may readily be identified by accessing the appropriate entry for a genome segment containing a listed target portion or a corresponding target portion from any strain and identifying the nucleotides that are immediately 5′ and/or 3′ of the listed or corresponding target portion. FIGS. 32A-32J present the genome segment sequences for PR8 (positive strand form).

[0183] The present invention provides RNAi-inducing agents that have been tested in cell culture and/or in animal models to verify their effectiveness and to identify portions of influenza virus transcripts that can be targeted in a highly effective manner. Example 18 describes a high throughput screen (HTS) that was used to identify siRNAs that effectively reduce levels of a targeted influenza virus transcript. Examples 19-22 describe high throughput screens that were used to identify siRNAs that effectively reduce influenza virus production in cells. Certain preferred effective siRNAs reduced influenza A virus titer by at least 4-fold when contacted with cells at a concentration of 100 nM. Certain preferred highly effective siRNAs reduced influenza virus titer by at least 8-fold, or to an even greater extent when contacted with cells at a concentration of 100 nM. Certain preferred effective siRNAs reduced influenza A virus titer by at least 4-fold when contacted with cells at a concentration of 1 nM. Certain preferred effective siRNAs reduced influenza A virus titer by at least 4-fold, at least 8-fold, or at least 16-fold when contacted with cells at a concentration of 100 nM. Certain highly effective siRNAs reduced influenza A virus titer by at least 2-fold when contacted with cells at concentrations of 5 nM or less. Certain even more highly effective siRNAs reduced influenza A virus titer by at least 2-fold when contacted with cells at concentrations of 1 nM or less. Yet more highly effective siRNAs reduce influenza A virus titer by at least 2-fold when contacted with cells at concentrations of 0.8 pM or less. Concentrations refer to concentrations at which the siRNA was present in a medium external to the cells at the time of introduction.

[0184] In certain embodiments an RNAi-inducing agent is targeted to a target portion within 200 nt from the 3′ end of a gene, e.g., the NP, PA, PB1, or PB2 gene. Seven highly effective siRNAs were found to target portions within this region. The inventors observed that the 5′ and 3′ ends of influenza gene segments contain ˜10 bases that are highly conserved both across different gene segments and across different influenza virus strains. Notably, 3 siRNAs that target the 5′ UTR of the PB1 transcript showed a 4-fold reduction in virus titer at 100 nM.

[0185] B. Synthesis of RNAi-Inducing Entities

[0186] Inventive RNAi-inducing agents may be prepared according to any available technique including, but not limited to chemical synthesis, enzymatic or chemical cleavage in vivo or in vitro, or template transcription in vivo or in vitro. For example, RNA may be produced enzymatically or by partiautotal organic synthesis, and a modified nucleotide can be introduced by in vitro enzymatic or organic synthesis. In one embodiment, a siRNA is prepared chemically. Methods of synthesizing RNA molecules are known in the art, in particular, the chemical synthesis methods as de scribed in Verma and Eckstein, Annu. Rev. Biochem. 67:99-134 (1998). In another embodiment, an siRNA is prepared enzymatically. For example, an siRNA can be prepared by enzymatic processing of a long dsRNA having sufficient complementarity to the desired target RNA. Processing of long dsRNA can be accomplished in vitro, for example, using appropriate cellular lysates and siRNAs can be subsequently purified by gel electrophoresis or gel filtration. For example, RNA can be purified from a mixture by extraction with a solvent or resin, precipitation, electrophoresis, chromatography, or a combination thereof. Alternatively, the RNA may be used with no or minimum purification to avoid losses due to sample processing.

[0187] Inventive RNAi-inducing agents may be delivered as a single shRNA molecule or as two strands hybridized to one another. For instance, two separate 21 nt RNA strands may be generated, each of which contains a 19 nt region complementary to the other, and the individual strands may be hybridized together to generate a structure such as that depicted in FIG. 5A.

[0188] In some embodiments each strand of an siRNA is generated by transcription from a promoter, either in vitro or in vivo. For instance, a construct may contain two separate transcribable regions, each of which generates a 21 nt transcript containing a 19 nt region complementary with the other. Alternatively, a single construct may be utilized that contains opposing promoters P1 and P2 and terminators t1 and t2 positioned so that two different transcripts, each of which is at least partly complementary to the other, are generated (FIG. 7). In another embodiment, an shRNA is generated as a single transcript, e.g., by transcription of a single transcription unit encoding self-complementary regions. FIG. 8 depicts one such embodiment. As indicated, a template is employed that includes first and second complementary regions, and optionally includes a loop region. The present invention encompasses constructs encoding one or more siRNA and/or shRNA strands. In addition to a promoter, the construct optionally includes one or more other regulatory elements, e.g., terminator.

[0189] In vitro transcription may be performed using a variety of available systems including the T7, SP6, and T3 promoter/polymerase systems (e.g., those available from Promega, Clontech, New England Biolabs, etc.). When siRNAs are synthesized in vitro they may be allowed to hybridize before transfection or delivery to a subject. It will be appreciated that inventive siRNA compositions need not consist entirely of double-stranded (hybridized) molecules. For example, siRNA compositions may include a small proportion of single-stranded RNA. Generally, preferred compositions comprise at least approximately 80% dsRNA, at least approximately 90% dsRNA, at least approximately 95% dsRNA, or even at least approximately 99-100% dsRNA. However, the siRNA compositions may contain less than 80% hybridized RNA provided that they contain sufficient dsRNA to be effective.

[0190] Those of ordinary skill in the art will appreciate that if inventive siRNA or shRNA agents are generated in vivo, it is generally preferable that they be produced via transcription of one or more transcription units. The primary transcript may optionally be processed (e.g., by one or more cellular enzymes) in order to generate the final agent that accomplishes gene inhibition. It will further be appreciated that appropriate promoter and/or regulatory elements can readily be selected to allow expression of the relevant transcription units in mammalian cells. In some embodiments of the invention, it may be desirable to utilize a regulatable promoter; in other embodiments, constitutive expression may be desired. The term “expression” as used herein in reference to synthesis (transcription) of siRNA or siRNA precursors does not imply translation of the transcribed RNA.

[0191] In certain preferred embodiments of the invention, the promoter utilized to direct in vivo expression of one or more siRNA or shRNA transcription units is a promoter for RNA polymerase III (Pol III). Pol III directs synthesis of small transcripts that terminate upon encountering a stretch of 4-5 T residues in the template. Certain Pol III promoters such as the U6 or H1 promoters do not require cis-acting regulatory elements (other than the first transcribed nt) within the transcribed region and thus are preferred according to certain embodiments of the invention since they readily permit the selection of desired siRNA sequences. See, e.g., Yu, J., et al., Proc. Natl. Acad. Sci., 99(9), 6047-6052 (2002); Sui, G., et al., Proc. Natl. Acad. Sci., 99(8), 5515-5520 (2002); Paddison, P., et al., Genes and Dev., 16, 948-958 (2002); Brummelkamp, T., et al., Science, 296, 550-553 (2002); Miyagashi, M. and Taira, K., Nat. Biotech., 20, 497-500 (2002); Paul, C., et al., Nat. Biotech., 20, 505-508 (2002); Tuschl, T., et al., Nat. Biotech., 20, 446-448 (2002). Promoters for Pol II may also be used as described, for example, in Xia, H., et al., Nat. Biotechnol., 20, pp. 1006-1010, 2002. As described therein, constructs in which a hairpin sequence is juxtaposed within close proximity to a transcription start site and followed by a polyA cassette, resulting in minimal to no overhangs in the transcribed hairpin, may be employed. In certain embodiments of the invention tissue-specific, cell-specific, or inducible Pol II promoters may be used, provided the foregoing requirements are met. Pol I promoters may also be used in various embodiments (McCown 2003).

[0192] It will be appreciated that in vivo expression of constructs that provide templates for synthesis of siRNA or shRNA, such as those depicted in FIGS. 7 and 8 can desirably be accomplished by introducing the constructs into a vector, such as, for example, a DNA plasmid or viral vector, and introducing the vector into mammalian cells. Any of a variety of vectors may be selected, though in certain embodiments it may be desirable to select a vector that can deliver the construct(s) to one or more cells that are susceptible to influenza virus infection. The present invention encompasses vectors containing siRNA and/or shRNA transcription units, as well as cells containing such vectors or otherwise engineered to contain transcription units encoding one or more siRNA or shRNA strands. In certain preferred embodiments of the invention, inventive vectors are gene therapy vectors appropriate for the delivery of an siRNA or shRNA expressing construct to mammalian cells, most preferably human cells. Such vectors may be administered to a subject before or after exposure to an influenza virus, to provide prophylaxis or treatment for diseases and conditions caused by infection with the virus.

[0193] The invention therefore provides a variety of viral and nonviral vectors whose presence within a cell results in transcription of one or more RNAs that self-hybridize or hybridize to each other to form an RNAi agent that inhibits expression of at least one influenza virus transcript in the cell. In certain embodiments of the invention two separate, complementary siRNA strands are transcribed using a single vector containing two promoters, each of which directs transcription of a single siRNA strand, i.e., is operably linked to a template for the siRNA so that transcription occurs. The two promoters may be in the same orientation, in which case each is operably linked to a template for one of the siRNA strands. Alternately, the promoters may be in opposite orientation flanking a single template so that transcription from the promoters results in synthesis of two complementary RNA strands.

[0194] In other embodiments of the invention a vector containing a promoter that drives transcription of a single RNA molecule comprising two complementary regions (e.g., an shRNA) is employed. In certain embodiments of the invention a vector containing multiple promoters, each of which drives transcription of a single RNA molecule comprising two complementary regions is used. Alternately, multiple different shRNAs may be transcribed, either from a single promoter or from multiple promoters. A variety of configurations are possible. For example, a single promoter may direct synthesis of a single RNA transcript containing multiple self-complementary regions, each of which may hybridize to generate a plurality of stem-loop structures. These structures may be cleaved in vivo, e.g., by Dicer, to generate multiple different shRNAs. It will be appreciated that such transcripts preferably contain a termination signal at the 3′ end of the transcript but not between the individual shRNA units. In another embodiment of the invention, the vector includes multiple promoters, each of which directs synthesis of a self-complementary RNA molecule that hybridizes to form an shRNA. The multiple shRNAs may all target the same transcript, or they may target different transcripts. Any combination of viral transcripts may be targeted. See Example 11 and FIG. 21.

[0195] Those of ordinary skill in the art will further appreciate that in vivo expression of RNAi-inducing agents according to the present invention may allow the production of cells that produce the agent over long periods of time (e.g., greater than a few days, preferably at least several weeks to months, more preferably at least a year or longer, possibly a lifetime). Such cells may be protected from influenza virus indefinitely.

[0196] Preferred viral vectors for use in the compositions to provide intracellular expression of RNAi-inducing agents include, for example, retroviral vectors, lentiviral vectors, adenoviral vectors, adeno-associated virus vectors, herpes virus vectors, etc. For example, see Kobinger, G. P., et al., Nat Biotechnol 19(3):225-30, 2001, describing a vector based on a Filovirus envelope protein-pseudotyped HIV vector, which efficiently transduces intact airway epithelium from the apical surface. See also Lois, C., et al., Science, 295: 868-872, Feb. 1, 2002, describing the FUGW lentiviral vector; Somia, N., et al. J. Virol. 74(9): 4420-4424, 2000; Miyoshi, H., et al., Science 283: 682-686, 1999; and U.S. Pat. No. 6,013,516.

[0197] It will be appreciated by those of ordinary skill in the art that agents such as the nucleic acids described herein, including but not limited to, nucleic acids having any of the structures depicted in FIG. 5, or any other effective structure described herein, may be comprised entirely of nucleotides such as those found in naturally occurring nucleic acids, or may instead include one or more analogs of such nucleotides or may otherwise differ from a naturally occurring nucleic acid. Nucleic acids containing modified backbones or non-naturally occurring internucleoside linkages can be used in the present invention.

[0198] Modified nucleic acids need not be uniformly modified along the entire length of the molecule. For example, different nucleotide modifications and/or backbone structures may exist at various positions in the nucleic acid. In certain embodiments of the invention it may be desirable to stabilize the siRNA structure, e.g., by including nucleotide analogs at one or more free strand ends in order to reduce digestion, e.g., by exonucleases. Including deoxynucleotides, e.g., pyrimidines such as deoxythymidines at one or more free ends may serve this purpose. Alternatively or additionally, it may be desirable to include one or more nucleotide analogs in order to increase or reduce stability of the 19 bp stem, in particular as compared with any hybrid that will be formed by interaction of one strand of an RNAi agent with a target transcript. One of ordinary skill in the art will appreciate that the nucleotide analogs may be located at any position(s) where the target-specific activity, e.g., the RNAi mediating activity is not substantially affected, e.g., in a region at the 5′-end and/or the 3′-end of the RNA molecule. For example, in certain embodiments between 1-5 residues at the 5′ and/or 3′ end of an siRNA or shRNA strand is a nucleotide analog. In certain embodiments of the invention one or more of the nucleic acids in an inventive RNAi-inducing agent comprises at least 50% unmodified RNA, at least 80% modified RNA, at least 90% unmodified RNA, or 100% unmodified RNA. In certain embodiments of the invention one or more of the nucleic acids in an inventive RNAi-inducing agent comprises 100% unmodified RNA within the portion that participates in duplex formation in the RNAi-inducing agent.

[0199] According to certain embodiments of the invention various nucleotide modifications are used selectively in either the sense or antisense strand of an siRNA, shRNA, or microRNA precursor. For example, it may be preferable to utilize unmodified ribonucleotides in the antisense strand while employing modified ribonucleotides and/or modified or unmodified deoxyribonucleotides at some or all positions in the sense strand. According to certain embodiments of the invention only unmodified ribonucleotides are used in the duplex portion of the antisense and/or the sense strand while the overhang(s) of the antisense and/or sense strand may include modified ribonucleotides and/or deoxyribonucleotides. In certain embodiments of the invention one or both siRNA strands comprises one or more O-methylated ribonucleotides.

[0200] Numerous nucleotide analogs and nucleotide modifications are known in the art, and their effect on properties such as hybridization and nuclease resistance has been explored. A number of modifications have been shown to alter one or more aspects of the oligonucleotide such as its ability to hybridize to a complementary nucleic acid, its stability, bioavailability, nuclease resistance, etc. For example, 2′-modifications include halo, alkoxy and allyloxy groups. In some embodiments the 2′-OH group is replaced by a group selected from H, OR, R, halo, SH, SR₁, NH₂, NHR, NR2 or CN, wherein R is C₁-C₆ alkyl, alkenyl or alkynyl and halo is F, Cl, Br or I. Examples of modified linkages include phosphorothioate and 5′-N-phosphoramidite linkages. U.S. Pat. Nos. 6,403,779; 6,399,754; 6,225,460; 6,127,533; 6,031,086; 6,005,087; 5,977,089, and references therein disclose a wide variety of nucleotide analogs and modifications that may be of use in the practice of the present invention. See also Crooke, S. (ed.) “Antisense Drug Technology: Principles, Strategies, and Applications” (1^{st} ed), Marcel Dekker; ISBN: 0824705661; 1st edition (2001) and references therein. For purposes of the present invention, the chemical elements are identified in accordance with the Periodic Table of the Elements, CAS version, Handbook of Chemistry and Physics, 75th Ed., inside cover, and specific functional groups are generally defined as described therein. Analogs and modifications may be tested using, e.g., the assays described herein or other appropriate assays, in order to select those that effectively reduce expression of viral genes. In certain embodiments the RNAi-inducing agent comprises one or more modifications to a sugar, nucleoside, or internucleoside linkage such as any of those described in U.S. Pub. Nos.20030175950, 20040192626, 20040092470, 20050020525, 20050032733 and/or references 137-139.

[0201] In certain embodiments of the invention the modification results in a nucleic acid with increased absorbability (e.g., increased absorbability across a mucus layer, increased oral absorption, etc.), increased stability in the blood stream or within cells, decreased clearance via the renal system, increased ability to cross cell membranes, increased ability to escape from an intracellular compartment such as an endosome, etc. As will be appreciated by one of ordinary skill in the art, analogs or modifications may result in altered Tm, which may result in increased tolerance of mismatches between the guide sequence and the target while still achieving effective suppression or may result in increased or decreased specificity for desired target transcripts.

[0202] It will further be appreciated by those of ordinary skill in the art that effective RNAi-inducing agents for use in accordance with the present invention may comprise one or more moieties that is/are not nucleotides or nucleotide analogs. In certain embodiments the nucleic acid comprises primarily nucleotide residues but comprises one or more residues that are not nucleotides. For example, in certain embodiments 1, 2, 3, 4, 5, or more of the residues in either strand of an effective silencing agent is not a nucleoside. In certain embodiments the portion of the RNAi-inducing agent that participates in duplex formation and/or is complementary to a target transcript consists of nucleosides while the overhang(s) consist of non-nucleoside residues. In certain embodiments of the invention sense and antisense strands of an RNAi-inducing agent are attached to one another by a non-nucleoside containing linker.

[0203] III. RNAi-Inducing Agents and Other Nucleic Acids Based on Identification of Preferred Influenza Virus Target Portions

[0204] The invention provides a variety of nucleic acids based on identification of potential target portions, functional target portions, favorably conserved target portions, and highly conserved target portions. In particular, the invention provides nucleic acids whose sequences comprise or consist of any of the potential target portions described above, including influenza sequences listed in Tables 1A, 1B, 17, 18, 20, and/or 34, or subsequences thereof that are at least 15 nucleotides in length (fragments). SiRNAs targeted to certain target portions showed unexpectedly high potency. To evaluate potency, siRNAs were administered to cells 6 hours prior to infection with influenza virus, and influenza virus production was tested 24 hours post-infection. In certain embodiments the sequence is selected from SEQ ID NOs: 272-380. SiRNAs targeted to these target portions (comprising an antisense strand 100% complementary to the target portion) showed a 4-fold reduction (75% decrease) in virus production in cells at 100 nM. In certain embodiments the sequence is selected from SEQ ID NOs: 274, 286, 287, 292, 297, 298, 304, 305, 309, 310, 311, 319, 324, 327, 334, 346, 347, 360, 361, 364, and 366. SiRNAs targeted to these target portions (comprising an antisense strand 100% complementary to the target portion) showed a 2-fold reduction (50% decrease) in virus production in cells at 5 nM. In certain embodiments the sequence is selected from SEQ ID NOs: 297, 309, 310, 311, 346, 347, 364, and 366. SiRNAs targeted to these target portions showed a 2-fold reduction (50% decrease) in virus production in cells at 5 nM, even when the target portion differed from the corresponding target portion in PR8 at up to two positions, i.e., there were up to two mismatches between the antisense siRNA strand and the target portion. Complements of these nucleic acids and fragments are also provided. In some embodiments the fragment is 16, 17, or 18 nt in length. The nucleic acids may be single stranded or double stranded and may be unmodified RNA or DNA, or modified versions thereof. The sequences may further include a 3′ overhang, e.g., a dTdT overhang. The invention also provides nucleic acids that are substantially identical to (e.g., at least 70%, at least 80% identical, at least 90% identical, 100% identical), 100% complementary to, or substantially complementary (e.g., at least 70%, at least 80% identical, at least 90% identical, 100% identical) to any of the sequences listed in Tables 1A, 1B, 17, 18, 20, and/or 34 or subsequences thereof that are at least 15 nt in length. The invention further provides vectors comprising one or more of the foregoing nucleic acids.

[0205] The nucleic acids include RNAi-inducing agents such as (i) siRNA; (ii) shRNA; (iii) single-stranded RNAs that hybridize with complementary single-stranded RNAs to form siRNAs; and (iv) vectors that comprise templates for transcription of any of the aforesaid nucleic acids. Where a sequence is presented as RNA, the corresponding DNA sequence is also provided by the invention (and vice versa). Where a sequence is presented herein, the invention encompasses a double-stranded nucleic acid comprising the sequence and its complement. Any of the nucleic acids of the invention may be limited in size. For example, the length of a nucleic acid may be 19 nt or less, 29 or 30 nt or less, 35 nt or less, 50 nt or less, or 100 nt or less.

[0206] The invention encompasses any nucleobase-containing structure in which residues, e.g., nucleotides, are linked together in an ordered manner, typically in a linear fashion, so that a nucleobase sequence can be assigned to the structure, wherein the sequence is any of the sequences disclosed herein. Various nucleobases and modified nucleotides and backbones are described above, any of which can be used. In various embodiments of the invention the structure is a nucleic acid, peptide nucleic acid (PNA), locked nucleic acid (LNA), or chimeric molecules, etc. See, e.g., W092/20702, U.S. Pat. Nos. 6,316,230, and references therein. The invention also encompasses a structure comprising alternate nucleobases that have the same base pairing specificity or can otherwise substitute for a nucleobase present in the sequence.

[0207] The single-stranded nucleic acids may be used as antisense or sense strands of an RNAi-inducing agent such as an siRNA or shRNA (optionally with the addition of one or more nucleotides at the 3′ end to form an overhang). Nucleic acids of the invention may also be used, for example, as conventional antisense reagents, as probes (e.g., to detect influenza virus infection), etc. “Conventional antisense” refers to methods of inhibiting expression of a transcript by administering single-stranded oligonucleotides in vitro or to a subject. Such inhibition is believed to operate by mechanisms distinct from those of RNAi and does not require a double-stranded RNA molecule (other than the duplex formed between the antisense oligonucleotide and a target transcript). See, e.g., Crooke, S., infra.

[0208] The invention therefore provides a nucleic acid comprising a target portion of an influenza A virus transcript wherein the sequence of the nucleic acid comprises at least 15, 16, 17, 18, or 19 contiguous nt of a sequence listed in one or more of Tables 1A, 1B, 17, 18, 20, and 34. In certain embodiments the sequence consists of or is contained within a sequence listed in one or more of Tables 1A, 1B, 17, 18, 20, and 34. The invention further provides a nucleic acid comprising a target portion of an influenza A virus mRNA transcript wherein the sequence of the nucleic acid comprises at least 15, 16, 17, 18, or 19 contiguous nucleotides of any potential influenza virus target portion. The nucleotides at the 5′ and 3′ ends are considered to be contained within a sequence. In certain embodiments the length of the sequence is 30 nt or less, 35 nt or less, 50 nt or less, or 100 nt or less.

[0209] The invention further provides nucleic acids comprising a portion whose sequence is substantially identical (at least 70%, at least 80%, at least 90%, at least 95%, or at least 99% identical) to any potential influenza virus target portion, e.g., any of the target portions listed in Tables 1A, 1B, 17, 18, 20 and/or 34. Certain of these portions contain differences at 1, 2, 3, 4, or 5 positions with respect to a potential influenza virus target portion, e.g., a target portion listed in any of Tables 1A, 1B, 17, 18, 20, and/or 34. In certain embodiments of the invention the difference at 1, 2, 3, 4, or 5 of the positions is a replacement of C in a target portion by U in the substantially identical sequence, or a replacement of A in the target portion by G in the substantially identical sequence. The sequence of certain nucleic acids of the invention comprises a sequence that is found in a target transcript adjacent to the sequence of a potential influenza virus target portion, e.g., a target portion listed in Table 1A, 1B, 17, 18, 20, and/or 34, i.e., is located 5′ or 3′ of the target portion.

[0210] The invention provides RNAi-inducing agents having antisense strands that are complementary to a potential influenza virus target portion, e.g., a target portion listed in Table 1A, 1B, 17, 18, 20 and/or 34 over a window of at least 15 nt, at least 16, at least 17 nt, at least 18 nt, preferably over 19 nt. For example the antisense strand may be 100% complementary to the listed highly conserved target portion over 15, 16, 17, 18, or 19 nt or may be substantially complementary, e.g., having between 1 and 5 mismatches with respect to the target portion. In certain embodiments one or more, e.g., all, mismatches between the inhibitory region of an antisense strand and the target is a U-G mismatch. The sense strand of an RNAi-inducing agent may be 100% complementary to or substantially complementary to the antisense strand. The invention also provides RNAi-inducing agents having sense strands with sequences that are 100% identical to or substantially identical to a highly and/or favorably conserved sequence listed in one or more of Tables 1A, 1B, 17, 18, 20, and/or 34 over 15, 16, 17, 18, or 19 nt.

[0211] For example, the invention provides an RNAi-inducing agent targeted to an influenza virus transcript, wherein the RNAi-inducing agent comprises: a nucleic acid portion whose sequence comprises a sequence selected from the group consisting of: SEQ ID NOs: 272-380, its complement, or a fragment of either having a length of at least 15 nucleotides. The RNAi-inducing agent preferably comprises a second nucleic acid portion that forms a duplex structure with the first nucleic acid portion. In certain embodiments the first and second nucleic acid portions are each 50 nt or less in length, e.g., 35 nt or less in length, e.g., 21-23 nt in length, etc. In certain embodiments the sequence is selected from the group consisting of: SEQ ID NOs: 274, 286, 287, 292, 297, 298, 304, 305, 309, 310, 311, 319, 324, 327, 334, 346, 347, 360, 361, 364, and 366, its complement, or a fragment of either having a length of at least 15 nucleotides. In certain embodiments the sequence is selected from the group consisting of: SEQ ID NOs: 297, 309, 310, 311, 346, 347, 364, and 366, its complement, or a fragment of either having a length of at least 15 nucleotides. In certain embodiments of the invention, the sequence of the antisense strand of an RNAi-inducing agent designed based on a potential influenza virus target portion, e.g., a target portion whose sequence is listed in Table 1A, 1B, 17, 18, 20, and/or 34 includes at least 10, at least 12, at least 15, at least 17, or at least 19 consecutive nt that are 100% complementary to the listed sequence. The sense strand of such RNAi-inducing agents may be 100% complementary to or substantially complementary to the antisense strand. In certain embodiments of the invention, the sequence of the sense strand of an RNAi-inducing agent designed based on a potential influenza virus target portion, e.g., a sequence presented in Table 1A, 1B, 17, 18, 20 and/or 34 includes least 10, at least 12, at least 15, at least 17, and/or at least 19 consecutive nt of a listed sequence.

[0212] In certain embodiments of the invention, the sequence of the antisense strand of an RNAi-inducing agent designed based on a potential influenza virus target portion, e.g., a target portion presented in Table 1A, 1B, 17, 20, and/or 34 includes at least 10, at least 12, at least 15, at least 17, and/or at least 19 consecutive nt that are 100% complementary to the listed sequence, except that 1 or 2 mismatches may exist. The sense strand of such RNAi-inducing agents may be 100% complementary to or substantially complementary to the antisense strand. In certain embodiments of the invention, the sequence of the sense strand of an RNAi-inducing agent designed based on a potential influenza virus target portion, e.g., a sequence listed in Table 1A, 1B, 17, 18, 20 and/or 34 includes at least 10 consecutive nucleotides, more preferably at least 12 consecutive nt, more preferably at least 15 consecutive nt, more-preferably at least 17 consecutive nt, and yet more preferably 19 consecutive nt of a listed sequence except that 1 or 2 nt may differ from the listed sequence.

[0213] In those embodiments of the invention in which the antisense strand is substantially or 100% complementary to the sequence over less than 19 nt, the remaining portion of the antisense strand may be, and preferably is, substantially complementary to or 100% complementary to influenza sequences that lie outside of and adjacent to the listed target portion. Thus the invention encompasses RNAi-inducing agents with antisense strands whose sequences are complementary to influenza sequences that are “shifted” by 1 or more nt, e.g, up to 9 nt, from the sequences in Tables 1A, 1B, 17, 18, 20 and/or 34. Adjacent sequences are found in FIGS. 32.

[0214] According to certain embodiments of the invention the RNAi-inducing agent is targeted to a region that is favorably and/or highly conserved among influenza variants that naturally infect organisms of at least 2, 3, 4, 5, or more different species. The species may include human, equine (horse), avian, swine and others. In certain preferred embodiments of the invention the species include humans.

[0215] The invention also provides vectors from which the inventive RNAi-inducing agents can be transcribed, cells containing the vectors, and methods of use for the treatment and/or prevention of influenza A virus infection.

[0216] The invention provides variants of a potential influenza virus target portion, e.g., variants of any of the nucleic acids listed in Tables 1A, 1B, 17, 18, 20, and/or 34, and nucleic acids comprising such variants (e.g., RNAi-inducing agents comprising such variants), wherein the sequence of a variant differs from the listed sequence at 1, 2, 3, 4, 5, or 6 positions. In certain preferred embodiments of the invention a variant of a listed sequence is identical or substantially identical to a portion of the sequence of a transcript from an influenza virus strain other than PR8, such as any of the influenza A virus strains listed in Tables 15A-15H and/or Tables 19A-19F. In addition, subsequences of the various sequences disclosed herein are also encompassed. Preferred subsequences are between 15-18 nt in length, e.g., 15, 16, 17, or 18 nt in length. Sequences related to the specific sequences listed herein by deletion and/or addition of nucleotide(s) are also encompassed. For example, nucleic acid sequences in which 1, 2, 3, 4, 5, or 6 nt are deleted from or added to any of the sequences listed herein are encompassed. In addition, sequences in which 1, 2, 3, 4, 5, or 6 nt are deleted from or added to a variant (as described above) of any of the sequences listed herein are encompassed. The nucleotides that are deleted or added may be located contiguously or noncontiguously with respect to the original sequence. They may be located internally or at one or both ends. The nucleotides that are added may be positioned anywhere within the sequence or may be appended at one or both ends.

[0217] Inventive nucleic acids, e.g., RNAi-inducing agents or vectors may be introduced into cells by any available method. For instance, nucleic acids or vectors encoding them can be introduced into cells via conventional transformation or transfection techniques. As used herein, the terms “transformation” and “transfection” refer to a variety of art-recognized techniques for introducing foreign nucleic acids (e.g., DNA or RNA) into a cell, including calcium phosphate or calcium chloride co-precipitation, DEAE-dextran-mediated transfection, lipofection, injection, or electroporation. Delivery agents such as those described below can be used.

[0218] The present invention encompasses any cell manipulated to contain an inventive nucleic acid, e.g., an RNAi-inducing agent such as an siRNA, shRNA, or vector that provides a template for synthesis of an inventive RNAi-inducing agent. The cell can be a mammalian cell, e.g., a human cell or a non-human mammalian cell, or a non-mammalian cell. Preferably the cell is one found in the nasal and/or respiratory passages or lungs of a mammalian subject and is susceptible to infection by an influenza virus. Most preferably the cell is a respiratory epithelial cell. Optionally, such cells also contain influenza virus RNA.

[0219] IV. Diagnostic Methods and Kits

[0220] The invention encompasses the recognition that RNAi-based therapy of infectious diseases, e.g., infections caused by a respiratory virus, can desirably incorporate a diagnostic step that determines whether a subject in need of treatment is infected with an infectious agent that is susceptible to inhibition by one or more RNAi-inducing entities. By “susceptible to inhibition” is meant that one or more biological activities of the infectious agent can be effectively inhibited by administration of the RNAi-inducing entity to a subject. Preferably replication, pathogenicity, spread, and/or production of the infectious agent is inhibited. For example, preferably replication, pathogenicity, spread, and/or production of the agent is inhibited by at least 25% when the RNAi-inducing entity is administered to a subject at a tolerated dose. Preferably the inhibition is sufficient to produce a therapeutically useful effect.

[0221] Influenza virus is used as an example to illustrate the diagnostic methods of the invention, which are tailored to allow the selection of an RNAi-inducing entity that is suitable for a subject suffering from an infection. The selected RNAi-inducing entity may, of course, also be administered for prophylaxis, e.g., to individuals who have come in contact with the infected individual, regardless of whether those individuals have developed symptoms of infection.

[0222] The invention therefore provides methods for diagnosing influenza virus infection and for determining whether a subject is infected with an influenza virus. In certain embodiments the method comprises determining whether a subject is infected with an influenza virus that is inhibited by one or more of the RNAi-inducing entities of the invention. For example, a sample (e.g., sputum, saliva, nasal washings, nasal swab, throat swab, bronchial washings, broncheal alveolar lavage (BAL) fluid, biopsy specimens, etc.) is obtained from a subject who may be suspected of having a viral infection, e.g., influenza. The sample can be subjected to one or more processing steps. Any such processed sample is considered to be obtained from the subject. The sample is analyzed to determine whether it contains an influenza virus-specific nucleic acid. An “influenza virus-specific nucleic acid” is any nucleic acid, or its complement, that originates from or is derived from an influenza virus and can serve as an indication of the presence of an influenza virus in a sample and, optionally, be used to identify the influenza strain and/or the sequence of an influenza gene. The nucleic acid may have been subjected to processing steps following its isolation. For example, it may be reverse transcribed, amplified, cleaved, etc. Preferably the sequence is at least 15 nt in length, e.g., 20-25 nt, 25-30 nt, or longer. In certain embodiments the sequence is distinct from sequences found in other viruses, so that its presence is specifically indicative of the presence of an influenza virus.

[0223] In certain embodiments the sequence of an influenza virus-specific nucleic acid present in the sample, or its complement, is compared with the sequence of the antisense or sense strand of an RNAi-inducing agent such as an siRNA or shRNA. The word “comparison” is used in a broad sense to refer to any method by which a sequence can be evaluated, e.g., which it can be determined whether the sequence is the same as or different to a reference sequence at one or more positions, or by which the extent of difference can be assessed.

[0224] Any of a wide variety of nucleic acid-based assays can be used. In certain embodiments the diagnostic assay utilizes a nucleic acid comprising a favorably and/or highly conserved target portion or its complement, or a fragment of the favorably and/or highly conserved portion or its complement. In certain embodiments the nucleic acid serves as an amplification primer or a hybridization probe, e.g., in an assay such as those described below.

[0225] In certain embodiments an influenza-specific nucleic acid in the sample is amplified. Any suitable amplification method can be used, including exponential amplification, linked linear amplification, ligation-based amplification, and transcription-based amplification. An example of an exponential nucleic acid amplification method is the polymerase chain reaction (PCR) which is described, for example, in Mullis et al. Cold Spring Harbor Symp. Quant. Biol. 51:263-273 (1986); PCR Cloning Protocols: From Molecular Cloning to Genetic Engineering, Methods in Molecular Biology, White, B. A., ed., vol. 67 (1998); Mullis EP 201,184; Mullis et al., U.S. Pat. Nos. 4,582,788 and 4,683,195; Erlich et al., EP 50,424, EP 84,796, EP 258,017, EP 237,362; and Saiki R. et al., U.S. Pat. No. 4,683,194. Linked linear amplification is disclosed by Wallace et al. in U.S. Pat. No. 6,027,923. Examples of ligation-based amplification are the ligation amplification reaction (LAR), taught by Wu et al. (Genomics 4:560 (1989)) and the ligase chain reaction (EP Application No. 0320308 B1). Hampson et al. (Nucl. Acids Res. 24(23):4832-4835, 1996) describe a directional random oligonucleotide primed (DROP) method.

[0226] Isothermal target amplification methods include transcription mediated amplification (TMA), self-sustained sequence replication (3SR), Nucleic Acid Sequence Based Amplification (NASBA), and variations thereof. (See Guatelli et al. Proc. NatL Acad. Sci. U.S.A. 87:1874-1878 (1990); U.S. Pat. Nos. 5,766,849 (TMA); and 5,654,142 (NASBA)) and others (e.g., as described in Malek et al., U.S. Pat. No. 5,130,238; Kacian and Fultz, U.S. Pat. No. 5,399,491; Burg et al., U.S. Pat. No. 5,437,990).

[0227] Detection or comparison can be performed using any of a variety of methods known in the art, e.g., amplification-based assays, hybridization assays, primer extension assays (e.g., allele-specific primer extension in which the corresponding target portions of different influenza virus strains are analogous to different alleles of a gene), oligonucleotide ligation assays (U.S. Pat. Nos. 5,185,243, 5,679,524 and 5,573,907), cleavage assays, heteroduplex tracking analysis (HTA) assays, etc. Examples include the Taqman® assay, Applied Biosystems (U.S. Pat. No. 5,723,591). In this assay, two PCR primers flank a central probe oligonucleotide. The probe oligonucleotide contains two fluorescent moieties. During the polymerization step of the PCR process, the polymerase cleaves the probe oligonucleotide. The cleavage causes the two fluorescent moieties to become physically separated, which causes a change in the wavelength of the fluorescent emission. As more PCR product is created, the intensity of the novel wavelength increases. Cycling probe technology (CPT), which is a nucleic acid detection system based on signal or probe amplification rather than target amplification (U.S. Pat. Nos. 5,011,769, 5,403,711, 5,660,988, and 4,876,187), could also be employed. Invasive cleavage assays, e.g., Invader® assays (Third Wave Technologies), described in Eis, P. S. et al., Nat. Biotechnol. 19:673, 2001, can also be used to detect influenza-specific nucleic acids. Assays based on molecular beacons (U.S. Pat. Nos. 6,277,607; 6,150,097; 6,037,130) or fluorescence energy transfer (FRET) may be used. Molecular beacons are oligonucleotide hairpins which undergo a conformational change upon binding to a perfectly matched template. The conformational change of the oligonucleotide increases the physical distance between a fluorophore moiety and a quencher moiety present on the oligonucleotide. This increase in physical distance causes the effect of the quencher to be diminished, thus increasing the signal derived from the fluorophore. U.S. Pub. No. 20050069908 and references therein describe a variety of other methods that can be used for the detection of nucleic acids. Probes of the invention may thus comprise one or more portions that hybridize to an influenza-specific sequence and one or more portions designed according to the specific assay. U.S. Pat. Nos. 5,854,033, 6,143,495, and 6,239,150 describe compositions and a method for amplification of and multiplex detection of molecules of interest involving rolling circle replication. The method is useful for simultaneously detecting multiple specific nucleic acids in a sample. For example, it may be used for determining the presence of one or more influenza-specific nucleic acids in the sample. Optionally the nucleic acids are sequenced. U.S. Pub. No. 20050026180 describes methods for multiplexing nucleic acid reactions, including amplification, detection and genotyping, which can be adapted for detection of influenza-specific sequences and for determining the sequence at specific locations of interest for purposes of determining susceptibility to an RNAi-inducing entity.

[0228] In certain embodiments the assay determines whether an influenza-specific nucleic acid in the sample comprises a portion that is identical to or different from a sense or antisense strand of an RNAi-inducing entity. Optionally the exact differences, if any, are identified. This information is used to determine whether the influenza virus is susceptible to inhibition by the RNAi-inducing entity. In addition to those discussed above, suitable assays for detection and/or genotyping of infectious agents are described in Molecular Microbiology: Diagnostic Principles and Practice, Persing, D. H., et al., (eds.) Washington, D.C.: ASM Press, 2004. Any of the assays can be performed using an automated system. A number of systems for performing nucleic acid-based diagnostic assays are known in the art and can readily be adapted for purposes of the present invention. In one embodiment nucleic acids from a sample are applied to a microarray (also referred to as a “chip”) to which a multiplicity of nucleic acids complementary to various different influenza virus transcripts or portions thereof are attached. The hybridization pattern is detected and provides sufficient information to determine whether the influenza virus is susceptible to inhibition by an RNAi-inducing entity. In certain embodiments an influenza-specific nucleic acid present in the sample is sequenced (typically following amplification). Multiple different assays can be used.

[0229] The diagnostic assays may employ any of the nucleic acids described in section III. In certain embodiments of the invention the nucleic acid comprises a nucleic acid portion that is not substantially complementary or substantially identical to an influenza virus transcript. For example, the nucleic acid may comprise a primer binding site (e.g., a binding site for a universal sequencing primer or amplification primer), a hybridization tag (which may, for example, be used to isolate the nucleic acid from a sample comprising other nucleic acids), etc. In certain embodiments of the invention the nucleic acid comprises a non-nucleotide moiety. The non-nucleotide moiety may be attached to a terminal nucleotide of the nucleic acid, e.g., at the 3′ end. The moiety may protect the nucleic acid from degradation. In certain embodiments the non-nucleotide moiety is a detectable moiety such as a fluorescent dye, radioactive atom, member of a fluorescence energy transfer (FRET) pair, quencher, etc. In certain embodiments the non-nucleotide moiety is a binding moiety, e.g. biotin or avidin. In certain embodiments the non-nucleotide moiety is a hapten such as digoxygenin, 2,4-Dinitrophenyl (TEG), etc. In certain embodiments the non-nucleotide moiety is a tag usable for isolation of the nucleic acid.

[0230] In certain embodiments of the invention a nucleic acid is attached to a support, e.g., a microparticle such as a bead, which is optionally magnetic. The invention further provides an array comprising a multiplicity of nucleic acids of the invention, e.g., at least 10, 20, 50, etc. The nucleic acids are covalently or noncovalently attached to a support, e.g., a substantially planar support such as a glass slide. See, e.g., U.S. Pat. Nos. 5,744,305; 5,800,992; 6,646,243.

[0231] Information regarding whether an influenza virus of a particular strain, or having a particular sequence within a target portion, is susceptible to inhibition by a particular RNAi-inducing entity, e.g., siRNA or shRNA having an antisense strand with a particular sequence, is referred to as “susceptibility information”. Susceptibility information can include quantitative information regarding the degree of susceptibility. For purposes of the present invention, an influenza virus is considered susceptible to inhibition by an RNAi-inducing entity such as an siRNA or shRNA if the RNAi-inducing entity reduces virus production in infected cells by at least 25% when contacted with the cells or administered to a subject at a tolerated dose.

[0232] In a preferred embodiment, if an influenza virus transcript comprises a target portion that is 100% identical to any of SEQ ID NOs: 272-380, preferably 100% identical to any of SEQ ID NOs: 274, 286, 287, 292, 297, 298, 304, 305, 309, 310, 311, 319, 324, 327, 334, 346, 347, 360, 361, 364, and 366, yet more preferably 100% identical to any of SEQ ID NOs: 297, 309, 310, 311, 346, 347, 364, and 366, the influenza virus is considered susceptible to an RNAi-inducing entity that comprises an antisense strand that is 100% complementary to the target portion. In other embodiments, if an influenza virus transcript comprises a target portion that differs at 1, 2, or 3 positions, preferably 1 or 2 positions, more preferably only I position from any of SEQ ID NOs: 272-380, the influenza virus is considered susceptible to an RNAi-inducing entity that comprises an antisense strand that is 100% complementary to the target portion. In other embodiments, if an influenza virus transcript comprises a target portion that differs at 1, 2, or 3 positions, preferably 1 or 2 positions, more preferably only 1 position from any of SEQ ID NOs: 274, 286, 287, 292, 297, 298, 304, 305, 309, 310, 311, 319, 324, 327, 334, 346, 347, 360, 361, 364, and 366, the influenza virus is considered susceptible to an RNAi-inducing entity that comprises an antisense strand that is 100% complementary to the target portion. In other embodiments, if an influenza virus transcript comprises a target portion that differs at 1, 2, or 3 positions, preferably 1 or 2 positions, more preferably only 1 position from any of SEQ ID NOs: 297, 309, 310, 311, 346, 347, 364, and 366, the influenza virus is considered susceptible to an RNAi-inducing entity that comprises an antisense strand that is 100% complementary to the target portion.

[0233] Information obtained from experiments or from previous experience in treating an influenza virus having a particular sequence within the target portion can also be used to decide whether the virus is susceptible to inhibition by a given RNAi-inducing entity or combination thereof. Susceptibility information can also include theoretical predictions based, for example, on the expected effect of any mismatches that exist between the influenza virus sequence and the antisense strand of an inhibitory agent.

[0234] Susceptibility information can be stored in a computer-readable form on a computer-readable medium, e.g., in an organized manner in a database. The results of a diagnostic test performed on a sample obtained from a subject are provided to a computerized system that accesses the information and determines the susceptibility profile of an influenza virus that infects the subject. In certain embodiments the system recommends a particular RNAi-inducing agent or combination thereof and/or a dose. The invention therefore provides a computerized system for determining susceptibility of a virus, e.g., an influenza virus, to an RNAi-inducing entity. The invention further provides a database containing susceptibility information. The computerized system and an automated system for performing the assay may be part of a single integrated automatic system or may be provided separately.

[0235] The invention provides diagnostic kits for detecting influenza virus infection. Certain of the kits comprise one or more nucleic acids of the invention. Certain of the kits comprise one or more nucleic acids that can be used to detect a portion of an influenza virus transcript that comprises a preferred target portion for RNAi. The kits may comprise one or more items selected from the group consisting of: a probe, a primer, a sequence-specific oligonucleotide, an enzyme, a substrate, an antibody, a population of nucleotides, a buffer, a positive control, and a negative control. The nucleotides may be labeled. For example, one or more populations of fluorescently labeled nucleotides such as dNTPs, ddNTPs, etc. may be provided.

[0236] The probe can be a nucleic acid that includes all or part of a target portion, e.g., a highly or favorably conserved target portion, or its complement, or is at least 80% identical or complementary to a target portion, e.g., 100% identical or complementary. In certain embodiments a plurality of probes are provided. The probes differ at one or more positions and can be used for determining the exact sequence of an influenza virus transcript at such positions. For example, the probes may differentially hybridize to the transcript (e.g., hybridization occurs only if the probe is 100% complementary to a target portion of the transcript).

[0237] The primers can be complementary to sites located upstream and downstream of a target portion and can be used to amplify a region of influenza virus nucleic acid comprising the target portion, which can then be sequenced or subjected to additional processes. The length of the amplified region may be, e.g., 100-200 nt, 200-300 nt, or more. Primers that bind to sites a sufficient distance away from the target portion to amplify a region of a desired length are selected. Methods for selecting amplification primers are well known in the art. The kits can comprise sequence-specific oligonucleotides. The oligonucleotides are sequence-specific in that they will only support polymerase-mediated extension or ligation when hybridized to a substantially complementary nucleic acid (e.g., an influenza virus-specific nucleic acid) if the 3′ terminal nucleotide of the oligonucleotide is perfectly complementary to the nucleic acid. Preferably a plurality of sequence-specific oligonucleotides are provided. The oligonucleotides differ at the 3′ terminal position and can therefore be used to establish the identity of a nucleotide that is located opposite that position when the oligonucleotide is hybridized to a nucleic acid of interest (e.g., an influenza virus-specific nucleic acid).

[0238] Kits of the invention can comprise specimen collection materials, e.g., a swab, a tube, etc. The components of the kit may be packaged in individual vessels or tubes which will generally be provided in a container, e.g., a plastic or styrofoam container suitable for commercial sale, together with instructions for use of the kit.

[0239] V. Transgenic Animals

[0240] The present invention encompasses transgenic animals engineered to contain or express an inventive RNAi-inducing agent. Such animals are useful for studying the function and/or activity of inventive RNAi agents, and/or for studying the influenza virus infection/replication system. As used herein, a “transgenic animal” is a non-human animal in which one or more of the cells of the animal, preferably most or all of the cells, includes a transgene. A transgene is exogenous DNA or a rearrangement, e.g., a deletion of endogenous chromosomal DNA, which preferably is integrated into or occurs in the genome of the cells of a transgenic animal. Preferably the transgene comprises a promoter operably linked to a nucleic acid such that expression of the nucleic acid occurs in the cell.

[0241] A transgene can direct the expression of an RNAi-inducing agent in one or more cell types or tissues of the transgenic animal. Certain preferred transgenic animals are non-human mammals, e.g., rodents such as rats or mice. Other examples of transgenic animals include non-human primates, sheep, dogs, cows, goats, birds such as chickens, amphibians, and the like. According to certain embodiments of the invention the transgenic animal is of a variety used as an animal model (e.g., murine, ferret, or primate) for testing potential influenza therapeutics. Other non-human animals contemplated within the invention include domesticated animals, including but not limited to livestock and pets, or any animal used or kept for profit. Such animals are partly or fully resistant to influenza virus infection. The RNAi-inducing agent may be, for example, an siRNA or shRNA. The RNAi-inducing agent can be targeted to any potential influenza virus target portion, e.g., a target portion listed in any of Tables 1A, 1B, 17, 18, 20, and/or 34. In certain embodiments the RNAi-inducing agent is targeted to a target portion whose sequence is selected from SEQ ID NOs: 274, 286, 287, 292, 297, 298, 304, 305, 309, 310, 311, 319, 324, 327, 334, 346, 347, 360, 361, 364, and 366, e.g., any of SEQ ID NOs: 297, 309, 310, 311, 346, 347, 364, and 366. For example, in preferred embodiments the RNAi-inducing agent has an antisense strand that is complementary to any of the foregoing target portions and a sense strand that forms a duplex with the antisense strand.

[0242] Methods for making transgenic non-human animals are known in the art. Briefly, these methods include (i) introducing an appropriate vector comprising the transgene into nuclei of fertilized eggs by microinjection, followed by transfer of the egg into the genital tract of a pseudopregnant female; and (ii) introducing an appropriate vector comprising a transgene into a cultured somatic cell (e.g., using any convenient technique such as transection, electroporation, etc.), selecting cells in which the transgene has integrated into genomic DNA, transferring the nucleus from a selected cell into an oocyte or zygote, optionally culturing the oocyte or zygote in vitro to the morula or blastula stage, and transferring the embryo into a recipient female. According to other methods, a retroviral vector comprising the transgene is used. The retroviral vector is introduced into cells either as DNA plasmid or as a viral particle, by infection. Cytoplasmic microinjection of an appropriate vector into an oocyte or embryonic cell can also be used. Sperm-mediated transgenesis is also encompassed. Heterozygous or chimeric animals obtained using these methods are identified and bred to produce homozygotes.

[0243] The vector is preferably an RNAi-inducing vector targeted to an influenza virus transcript. In a preferred embodiment the vector comprises a template for transcription of an RNAi-inducing agent such as an siRNA or shRNA targeted to a target portion that is favorably and/or highly conserved among influenza viruses that are derived from organisms of the species of the transgenic animal and, optionally also among influenza viruses derived from another species such as humans. The vector comprises a promoter operably linked to a template for transcription of the RNAi-inducing agent. The RNAi-inducing agent may be produced as a single RNA molecule comprising complementary portions or as two RNA molecules that hybridize within the cell, as described above. The promoter may, but need not be, derived from the species of the transgenic animal. RNA Pol I, II, or III promoters can be used. The promoter can be constitutive or inducible.

[0244] Lin a preferred embodiment the transgenic animals are avians, e.g., chickens. Methods for making transgenic avians are known in the art and include those described above and variations thereof. Vectors and methods suitable for production of transgenic avians and other transgenic animals are described, for example, in U.S. Pat. No. 6,730,822, U.S. Pub. Nos. 20020108132 and 20030126629, and references in these. In certain embodiments the transgenic avian is produced using a retroviral vector, e.g., an avian leukosis virus vector. In other embodiments the transgenic avian is produced using a eukaryotic vector other than a retroviral vector, although the vector may comprise one or more sequences derived from a retrovirus. In certain embodiments the transgenic avian expresses a plurality of RNAi-inducing agents each having an antisense strand with a different inhibitory region sequence. The RNAi-inducing agents may each be targeted to a different influenza virus strain.

[0245] The invention provides flocks of transgenic avians in which different members of the flock express one or more different RNAi-inducing agents each having an antisense strand with a different inhibitory region sequence. For example, a first fraction of the flock expresses a first RNAi-inducing agent comprising an antisense strand that is 100% complementary to a target portion of a first avian influenza strain, a second fraction of the flock expresses a first RNAi-inducing agent comprising an antisense strand that is 100% complementary to a target portion of a second avian influenza strain, and a third fraction of the flock expresses a third RNAi-inducing agent comprising an antisense strand that is 100% complementary to a target portion of a third avian influenza strain, etc. Flocks whose members express different RNAi-inducing agents may be less susceptible to the emergence of a resistant influenza virus strain than would be the case if all members express identical RNAi-inducing agents.

[0246] In another preferred embodiment the transgenic animals are mammals, e.g., pigs (swine), bovines, etc. Methods suitable for making transgenic mammals include those discussed above, aspects of which are further described in Gordon et al., Proc. Natl. Acad. Sci U.S.A., 77:7380-7384, 1980 (germ line transfer by micro injection of DNA into one-cell embryos), Hooper et al., Nature, 326:292-295, 1987; Kuehn et al., Nature, 326:295-298, 1987 (transfer of genetically engineered embryonic stem-cells into blastocysts), and Campbell et al., Nature, 380:64-66, 1996 (transfer of nuclei from engineered cells into enucleated oocytes). Additional references describe applications of transgenic technology to swine (U.S. Pat. No. 6,558,663; Machaty, Z, et al., Cloning Stem Cells, 4(1):21-7, 2002; Wall et al., Proc. Natl. Acad. Sci. U.S.A., 88:1696-1700, 1991), sheep (Wright et al., Biotechnology, 9:830-834, 1991), goats (Wang, B., et al., Mol Reprod Dev., 63(4):437-43, 2002), and bovines (Krimpenfort et al., Biotechnology, 9:844-847, 1991; Galli, et al., Theriogenology, 59(2):599-616, 2003).

[0247] In another preferred embodiment the transgenic animals are rodents, e.g., mice. Mice and rats that express RNAi-inducing agents have been produced using a variety of different approaches (see, e.g., Hasuwa, et al, FEBS Lett. 2002 Dec. 4;532(1-2):227-30. Xia, et al., Nat. Biotechnol., 20(10):1006-10, 2002; Rubinson, et al, Nat Genet., 33(3):401-6, 2003).

[0248] VI. Compositions and Methods for Delivery of RNAi-Inducing Entities

[0249] RNAi-inducing entities may be administered according to a variety of approaches. In one embodiment of the invention, a single species of RNAi-inducing agent is administered to a subject. A nonlimiting example is a single siRNA species comprising an antisense strand complementary to a favorably and/or highly conserved target portion from a variety of influenza virus strains. In related embodiments, a population of two or more different RNAi-inducing agents are administered to a subject. In one embodiment, the population of two or more RNAi-inducing agents include agents that contain antisense strands whose sequences are substantially complementary (preferably 100% complementary) to the same favorably and/or highly conserved region from a variety of strains of a particular virus, e.g., an influenza virus. In another embodiment, the population of two or more RNAi-inducing agents includes agents that contain antisense strands whose sequences are substantially complementary (preferably 100% complementary) to different conserved regions from the same virus strain. In yet another embodiment, the population of two or more RNAi-inducing agents include agents that contain antisense strands whose sequences are substantially complementary (preferably 100% complementary) to the same favorably and/or highly conserved region from a variety of strains of a particular virus, e.g., an influenza virus and RNAi-inducing agents includes agents that contain antisense strands whose sequences are substantially complementary (preferably 100% complementary) to different highly conserved regions from the same virus strain.

[0250] The inventors have recognized that effective RNAi therapy in general, including prevention and therapy of influenza virus infection, will be enhanced by efficient delivery of RNAi-inducing agents and/or RNAi-inducing vectors into cells in intact organisms. In the case of influenza virus, such agents must be introduced into cells in the respiratory tract, where influenza infection normally occurs. For use in humans, it may be preferable to employ non-viral methods that facilitate intracellular uptake of RNAi-inducing agents. The invention therefore provides compositions comprising any of a variety of non-viral delivery agents for enhanced delivery of RNAi-inducing agents and/or vectors to cells in intact organisms, e.g., mammals and avians. As used herein, the concept of “delivery” includes transport of an RNAi-inducing agent or RNAi-inducing vector from its site of entry into the body to the location of the cells in which it is to function, cellular uptake, and/or any subsequent steps involved in making the agent or available to the intracellular RNAi machinery (e.g., release of siRNA or shRNA from endosomes). Components that stabilize the RNAi-inducing agent either once it is in the body or during the process of formulating the agent for delivery, inhibit its degradation (e.g., RNase inhibiting agents such as RNasin), can also be included in the inventive compositions. In general, any agent that inhibits the activity of an RNase either fully or partially can be used. Examples include RNase inhibitors purified from human placenta or recombinant versions thereof. While the delivery agents are primarily of use for enhancing delivery of RNAi-inducing agents, they may also be used to enhance delivery of RNAi-inducing vectors.

[0251] In certain embodiments of the invention the delivery agent enhances stability, inhibits clearance, promotes cellular uptake of the composition, promotes release of the RNAi-inducing entity within the cell, reduces cytotoxicity, or directs the composition to a particular cell type, tissue, or organ. To “inhibit clearance” means to reduce the rate of removal of the composition from the body by the renal system. The delivery agent may inhibit uptake by cells of the reticulo-endothelial system such as macrophages. The RNAi-inducing entity itself may be modified (e.g., covalently modified) to enhance stability, inhibit clearance, promote cellular uptake, promote release of the RNAi agent and/or vector from an intracellular compartment such as an endosome, reduce cytotoxicity, or direct the composition to a particular cell type, tissue, or organ. For example, an RNAi-inducing agent may be pegylated, and/or an arginine-rich peptide may be conjugated to the RNAi-inducing agent.

[0252] The invention therefore encompasses compositions comprising (i) an RNAi-inducing agent targeted to a transcript, and/or an RNAi-inducing vector whose presence within a cell results in production of an RNAi-inducing agent targeted to a transcript; and (ii) any of a variety of delivery agents including, but not limited to, cationic polymers, modified cationic polymers, peptide molecular transporters (including arginine or histidine-rich peptides), carbohydrates, lipids (including cationic lipids, neutral lipids, and combinations thereof), liposomes. lipopolyplexes, non-cationic polymers, surfactants suitable for introduction into the lung, or mixtures of any of the foregoing, etc. Certain of the delivery agents incorporate a moiety that increases delivery or increases the selective delivery of the RNAi-inducing agent or vector to cells in which it is desired to inhibit the transcript. In certain embodiments the transcript is a respiratory virus transcript, e.g., an influenza virus transcript.

[0253] While use of specific delivery agents is preferred in certain embodiments of the invention, in other preferred embodiments an RNAi-inducing entity such as an RNAi-inducing agent is administered in “naked” form, i.e., in the absence of any delivery agent that enhances transfection, cellular entry, etc. For example, an RNAi-inducing agent can be administered in an aqueous medium that is essentially free of lipids and is essentially free of delivery-enhancing polymers, e.g., cationic or noncationic polymers such as those described below. RNAi-inducing agents can be administered in naked form intravenously or directly to the respiratory system (e.g., by inhalation through the nose or mouth and into the lungs). In certain embodiments the RNAi-inducing agent is administered in an amount effective to treat or prevent a respiratory virus infection while resulting in minimal absorption into the blood and thus minimal systemic delivery of the RNAi-inducing agent.

[0254] A. Delivery Methods

[0255] The invention provides a variety of methods for delivering a composition comprising an RNAi-inducing entity to a mammalian subject. In certain embodiments the composition is delivered directly to the vascular system and achieves inhibition of a target transcript in an organ or tissue of the subject, e.g., the lung. In other embodiments the composition is delivered directly to the respiratory system. Certain of the methods are employed in Examples 16, 22, 23, and 24, in which influenza virus production and luciferase or cyclophilin B expression are inhibited in a target organ of a mammalian subject using the methods. These results indicate that the methods are widely applicable to the inhibition of virtually any desired target transcript.

[0256] In particular, the invention provides a method of inhibiting expression of a gene in a tissue or organ of a mammalian subject comprising the step of: introducing a composition comprising an effective amount of an RNAi-inducing agent targeted to the gene directly into the vascular system of the subject without using a hydrodynamic transfection technique. Preferably the RNAi-inducing agent inhibits expression of a target transcript in the lung. The tissue may be a non-circulating tissue, i.e., a tissue other than blood. In a related embodiment, the invention further provides a method of method of inhibiting production of a virus in the respiratory system of a mammalian subject, wherein the virus infects respiratory epithelial cells, the method comprising the step of: introducing a composition comprising an effective amount of an RNAi-inducing agent targeted to a gene of the virus into the vascular system of the subject by injection without using a hydrodynamic transfection technique.

[0257] The invention further provides a method of inhibiting expression of a gene in the lung of a mammalian subject comprising the step of: introducing a composition comprising an effective amount of an RNAi-inducing agent targeted to the gene and a delivery agent directly into the respiratory system of the subject. In a preferred embodiment the gene is a respiratory virus gene, e.g., an influenza virus gene. Preferably the effective amount inhibits production of influenza virus in the respiratory system of the subject. In certain embodiments of the method or any other aspect of the invention, the virus is a respiratory virus other than RSV.

[0258] The composition may, for example, be administered via the nose or mouth, typically followed by inhalation. The composition may comprise particles that remain primarily in the upper respiratory tract, e.g., nose, pharynx, etc., as in a typical nasal or oral spray. In other embodiments the particles are inhaled into the lower respiratory tract. Respirable formulations that may be used to directly deliver a composition to the respiratory system are discussed below. In certain embodiments delivery directly to the respiratory system results in systemic delivery, e.g., the RNAi-inducing agent enters the vascular system from the lung and is transported to a target organ or tissue elsewhere in the body.

[0259] Methods for delivering an effective amount of an RNAi-inducing agent to the respiratory system of a mammalian subject have a wide variety of uses including, but not limited to, preventing or treating respiratory virus infection. RNAi-inducing agents targeted to appropriate transcripts can also be administered using the inventive methods for prevention and/or treatment of a variety of other diseases and conditions that affect the respiratory system. Examples include cancer, e.g., lung cancer, cystic fibrosis (See, e.g., U.S. Ser. No. 10/200,607), asthma (See, e.g., U.S. Ser. No. 11/069,611), pulmonary hypertension, pulmonary fibrosis, emphysema, etc. Suitable target genes include, for example, oncogenes, genes that encode pro-angiogenic molecules and/or growth factors such as vascular endothelial growth factor, pro-inflammatory molecules, etc. Of course transcripts that play a role in diseases affecting any part of the body can be targeted when the RNAi-inducing agent is delivered systemically.

[0260] In certain embodiments of the invention the effective amount is between 0.1 mg/kg and 5 mg/kg of the subject's body weight. In other embodiments the effective amount is between 0.1 mg/kg and 10 mg/kg of the subject's body weight, or between 0.5 mg/kg and 20 mg/kg of the subject's body weight.

[0261] Compositions comprising RNAi-inducing entities may or may not include a delivery agent. Delivery agents suitable for use in the present invention include those described below and in co-pending U.S. Ser. No. 10/674,087. The delivery agents may be used in combination.

[0262] B. Cationic Polymers and Modified Cationic Polymers

[0263] The inventors have determined that delivery of RNAi-inducing agents by a number of different routes is enhanced by any of a variety of cationic polymers and modified cationic polymers. The invention therefore provides compositions comprising (i) an RNAi-inducing entity targeted to a target transcript and (ii) a cationic polymer. The invention further provides methods of inhibiting target gene expression comprising administering a composition comprising an RNAi-inducing agent targeted to a target transcript to a mammalian subject. In particular, the invention provides methods of treating and/or preventing influenza virus infection comprising administering a composition comprising an RNAi-inducing agent that targets an influenza virus transcript and a cationic polymer to a mammalian subject.

[0264] In general, a cationic polymer is a polymer that is positively charged at approximately physiological pH, e.g., a pH ranging from approximately 7.0 to 7.6, preferably approximately 7.2 to 7.6, more preferably approximately 7.4. Such cationic polymers include, but are not limited to, polylysine (PLL), polyarginine (PLA), polyhistidine, polyethyleneimine (PEI) (37), including linear or branched PEI and low molecular weight PEI as described, for example, in (76), polyvinylpyrrolidone (PVP) (38), chitosan (39, 40), protamine, polyphosphates, polyphosphoesters (such as those described in US Publication No. 20020045263), poly(N-isopropylacrylamide), etc. Certain of these polymers comprise primary amine groups, imine groups, guanidine groups, and/or imidazole groups. Preferred cationic polymers have relatively low toxicity. References 85-87; U.S. Ser. No. 6,013,240; W09602655; and U.S. Pub. Nos. 20040167087 and 20030157030 provide further information on PEI and other polymers useful in the practice of the invention. The commercially available PEI reagent known as jetPEI™ (Qbiogene, Carlsbad, Calif.), a linear form of PEI (U.S. Ser. No. 6,013,240) can be used.

[0265] Suitable cationic polymers also include blends of polymers of different molecular weight, copolymers comprising subunits of any of the foregoing polymers (or others), e.g., lysine-histidine copolymers, etc. The percentage of the various subunits need not be equal in the copolymers but may be selected, e.g., to optimize such properties as ability to form complexes with nucleic acids while minimizing cytotoxicity. Furthermore, the subunits need not alternate in a regular fashion. Appropriate assays to evaluate various polymers with respect to desirable properties are described in the Examples. Preferred cationic polymers also include polymers such as the foregoing, further incorporating any of various modifications. Appropriate modifications are discussed below and include, but are not limited to, modification with acetyl, succinyl, acyl, or imidazole groups (32).

[0266] While cationic polymers have been shown to facilitate DNA plasmid transfection, given the considerable differences in structure and size between siRNA and shRNA molecules and DNA plasmids, whether cationic polymers would prove useful in enhancing uptake of siRNA was highly uncertain. However, as described in Example 12, the inventors have shown that compositions comprising PEI, PLL, or PLA and an siRNA that targets an influenza virus RNA significantly inhibit production of influenza virus in mice when administered intravenously either before or after influenza virus infection. The inhibition is dose-dependent and exhibits additive effects when two siRNAs targeted to different influenza virus RNAs were used. Thus siRNA, when combined with a cationic polymer such as PEI, PLL, or PLA, is able to reach the lung, to enter cells, and to effectively inhibit the viral replication cycle. While the presence of PEI significantly enhanced delivery to the lung, effective delivery occurred even in its absence (Examples 12; FIGS. 22C), indicating that effective siRNA delivery to the respiratory system can be achieved using “naked” siRNA. It is believed that these findings represent the first report of efficacy in inhibiting production of infectious virus in a mammal using siRNA (as opposed, for example, to inhibiting production of viral transcripts or intermediates in a viral replicative cycle). As described in Example 16, pulmonary administration of a mixture of siRNA and a cationic polymer effectively inhibited a target transcript in lung cells. Examples 23 and 24 and FIG. 31 provide further evidence that naked siRNA delivered to the respiratory system of a mammalian subject effectively inhibits expression of a target transcript therein.

[0267] Other efforts to deliver siRNA intravenously to solid organs and tissues within the body (see, e.g., McCaffrey 2002; McCaffrey 2003; Lewis, D. L., 2002) have employed the technique known as hydrodynamic transfection, which involves rapid delivery of large volumes of fluid into the tail vein of mice and has been shown to result in accumulation of significant amounts of plasmid DNA in solid organs, particularly the liver (Liu 1999; Zhang 1999; Zhang 2000). This technique involves delivery of fluid volumes that are almost equivalent to the total blood volume of the animal, e.g., 1.6 ml for mice with a body weight of 18-20 grams, equivalent to approximately 8-12% of body weight, as opposed to conventional techniques that involve injection of approximately 200 μl of fluid (Liu 1999). In addition, injection using the hydrodynamic transfection approach takes place over a short time interval (e.g., 5 seconds), which is necessary for efficient expression of injected transgenes (Liu 1999). siRNA has also been delivered intravenously to subcutaneously implanted tumor cells in nude mice (Filleur 2003), but the relevance of this finding for intravenous delivery of RNAi-inducing agents to native organs and tissues is unclear given the distinctive features of this system. Furthemore, the present invention demonstrates effective intravenous delivery of an RNAi-inducing agent at doses of 5 mg/kg or less, e.g., 0.1-5 mg/kg of the body weight of a subject.

[0268] While the mechanism by which hydrodynamic transfection achieves transfer and high level expression of injected transgenes in the liver is not entirely clear, it is thought to be due to a reflux of DNA solution into the liver via the hepatic vein due to a transient cardiac congestion (Zhang 2000). A comparable approach for therapeutic purposes in humans seems unlikely to be feasible. The inventors, in contrast, have used conventional volumes of fluid (e.g., 200 μl) and have demonstrated effective delivery of siRNA to the lung under conditions that would be expected to lead to minimal expression of injected transgenes even in the liver, the site at which expression is most readily achieved using hydrodynamic transfection.

[0269] The invention therefore provides a method of inhibiting expression of a transcript, e.g., a viral transcript such as an influenza virus transcript, in a cell within a mammalian subject comprising the step of introducing a composition comprising an RNAi-inducing agent such as an siRNA or shRNA targeted to the target transcript into the vascular system of the subject using a conventional injection technique, e.g., a technique using conventional pressures and/or conventional volumes of fluid. In preferred embodiments of the invention the intravenous administration results in a therapeutically effective dose of the agent within a target organ, e.g., the lung. In certain embodiments of the invention the composition comprises a cationic polymer. In preferred embodiments of the invention the composition is introduced in a fluid volume equivalent to less than 10% of the subject's body weight. In certain embodiments of the invention the fluid volume is equivalent to less than 5%, less than 2%, less than 1%, or less than 0.1% of the subject's body weight. In certain embodiments of the invention the method achieves delivery of effective amounts of an RNAi-inducing agent in a cell in a body tissue or organ other than the liver, for example, the lung. In certain preferred embodiments of the invention the composition is introduced into a vein, e.g., by intravenous injection. However, the composition may also be administered into an artery, delivered using a device such as a catheter, indwelling intravenous line, etc. In certain preferred embodiments of the invention the RNAi-inducing agent inhibits production of a virus, e.g., in the lung.

[0270] As described in Example 15, the inventors have also shown that the cationic polymers PLL and PLA form complexes with siRNAs and promote uptake of functional siRNA in cultured cells. Transfection with complexes of PLL and NP-1496 or complexes of PLA and NP-1496 siRNA inhibited production of influenza virus in cells. These results and the results in mice discussed above demonstrate the advantages of using mixtures of cationic polymers and siRNA for delivery of siRNA to mammalian cells in the body of a subject. The approach described in Example 15 may be employed to test additional polymers, e.g., polymers modified by addition of groups (e.g., acyl, succinyl, acetyl, or imidazole groups) to reduce cytotoxicity, and to optimize those that are initially effective. Certain preferred modifications result in a reduction in the positive charge of the cationic polymer. Certain preferred modifications convert a primary amine into a secondary amine. Methods for modifying cationic polymers to incorporate such additional groups are well known in the art. (See, e.g., ref. 32). For example, the ε-amino group of various residues may be substituted, e.g., by conjugation with a desired modifying group after synthesis of the polymer. In general, it is desirable to select a %substitution sufficient to achieve an appropriate reduction in cytotoxicity relative to the unsubstituted polymer while not causing too great a reduction in the ability of the polymer to enhance delivery of the RNAi-inducing agent. Accordingly, in certain embodiments of the invention between 5% and 75%, e.g., approximately 50% of the residues in the polymer are substituted. Similar effects may be achieved by initially forming copolymers of appropriately selected monomeric subunits, i.e., subunits some of which already incorporate the desired modification. Cationic polymers for use to facilitate delivery of RNAi-inducing agents may be modified so that they incorporate one or more residues other than the major monomeric subunit of which the polymer is comprised. For example, one or more alternate residues may be added to the end of a polymer, or polymers may be joined by a residue other than the major monomer of which the polymer is comprised.

[0271] A variety of additional cationic polymers may also be used. Examples include oly(β-amino ester) (PAE) polymers (such as those described in U.S. Ser. No. 09/969,431; 10/446,444; US Pub. 20020131951 and in refs. 34 and 93). While some poly(β-amino ester) (PAE) polymers have been shown to facilitate DNA plasmid transfection, given the considerable differences in structure and size between siRNA and shRNA molecules and DNA plasmids, whether cationic polymers would prove useful in enhancing uptake of siRNA was highly uncertain. However, as described in Example 12, the inventors showed that siRNA targeted to NP (NP-1496) inhibited influenza virus production in mice when administered intravenously together with a poly(beta amino ester). In addition, this siRNA inhibited influenza virus production in mice when administered intraperitoneally together with a second poly(beta amino ester).

[0272] Additional cationic polymers that may also be used to enhance delivery of inventive RNAi-inducing agents include polyamidoamine (PAMAM) dendrimers, poly(2-dimethylamino)ethyl methacrylate (pDMAEMA), and its quaternary amine analog poly(2-triemethylamino)ethyl methacrylate (pTMAEMA), poly [a-(4-aminobutyl)-L-glycolic acid (PAGA), and poly (4-hydroxy-1-proline ester). See Han (2000) for further description.

[0273] Modified cationic polymers, e.g., poly(L-histidine)-graft-poly(L-lysine) polymers (Benns 2000), polyhistidine-PEG (Putnam 2003), folate-PEG-graft-polyethyleneimine (Benns 2002), polyethylenimine-dextran sulfate (Tiyaboonchai 2003), etc., can be used. The polymers may be branched or linear and may be grafted or ungrafted. In certain embodiments the polymers form complexes with inventive RNAi-inducing entities, which are then administered to a subject. Any of the polymers may be modified to incorporate PEG or other hydrophilic polymers. Cationic polymers may be multiply modified.

[0274] The invention encompasses modification of any of the delivery agents described herein to incorporate a moiety that enhances delivery of the agent to cells and/or enhances the selective delivery of the agent to specific cells. Any of a variety of moieties may be used, e.g., (i) antibodies or antibody fragments that specifically bind to a molecule expressed by a cell in which inhibition is desired, (e.g., a respiratory epithelial cell); (ii) ligands that specifically bind to a molecule expressed by a cell in which inhibition is desired. Methods for conjugating antibodies, ligands, and/or delivery agents to nucleic acids or to the various delivery agents described herein are well known in the art. See e.g., “Cross-Linking”, Pierce Chemical Technical Library, available at the Web site having URL www.piercenet.com and originally published in the 1994-95 Pierce Catalog and references cited therein and Wong S S, Chemistry of Protein Conjugation and Crosslinking, CRC Press Publishers, Boca Raton, 1991; and G. T. Hermanson, Bioconjugate Techniques, Academic Press, Inc., 1995.

[0275] C. Additional Agents for Delivering RNAi-Inducing Entities to the Respiratory System

[0276] The invention encompasses compositions comprising any of a variety of additional agents and an RNAi-inducing entity, wherein the agent enhances delivery of the RNAi-inducing entity, e.g., to respiratory epithelial cells.

[0277] In certain embodiments peptide molecular transporters, which are peptides that can penetrate the plasma membrane from the cell surface, are included in a composition. They generally consist of 11-34 amino acid residues, are highly enriched for arginine, and are often referred to as arginine rich peptides (ARPs) or penetratins (see references 42-51, 120, 134-36).

[0278] In other embodiments a composition comprises a surfactant suitable for introduction into the lung. Examples include commercially available formulations Infasurf® (ONY, Inc., Amherst, N.Y.); Survanta® (Ross Labs, Abbott Park, Ill.), and Exosurf Neonatal® (GlaxoSmithKline, Research Triangle Park, NC). U.S. Pat. Nos. 4,338,301; 4,397,839; 4,312,860; 4,826,821; 5,110,806). U.S. Ser. No. 4,312,860; 4,826,821; and 5,110,806 describe additional surfactant compositions. In general, any lipid-containing material that does not cause substantial injury to the lung can be used as a surfactant.

[0279] Administration with detergents and thixotrophic solutions may also be used. Perfluorochemical liquids, e.g., heptacosafluorotributylamine (Fluorinert), and related molecules, may also be used. See (74, 126, 150) and U.S. Pat. No. 6,638,767 for further discussion. In addition, the invention encompasses the use of protein/polyethylenimine complexes incorporating inventive RNAi-inducing entities, for delivery, e.g., to the respiratory system, e.g., the lung. Other delivery agents that can be used include natural and synthetic cyclodextrins and mixtures of these with other delivery agents. See Singh, M, et al., Biotechnol Adv. 20(5-6):341-59, 2002; Eastburn, S D and Tao, B Y, Biotechnol Adv., 12(2):325-39, 1994) and U.S. Pub. No. 20030157030 for further information. Various non-cationic polymers such as poly(lactide) (PLA), poly(glycolide) (PLG), and poly(DL-lactide-co-glycolide) (PLGA) (Panyam 2002), polyvinyl alcohol, poly(N-ethyl-4-vinylpyridium bromide, Pluronics, poly(ether-anhydride) may be used. Combinations between cationic and non-cationic polymers such as poly(lactic-co-glycolic acid) (PLGA)-grafted poly(L-lysine) (Jeong 2002) and other combinations including PLA, PLG, or PLGA and any of the cationic polymers or modified cationic polymers such as those discussed above are employd in certain embodiments. Block copolymers, which may comprise cationic and/or non-cationic monomers, may also be used. Examples are described in U.S. Pat. Nos. 6,800,663; 6,692,770; 6,669,959; 6,616,941; 6,592,899; and 6,517,869.

[0280] VII. Compositions for Inhalational Delivery of RNAi-Inducing Entities

[0281] The invention provides compositions comprising RNAi-inducing entities, for administration by inhalation. Preferably the RNAi-inducing entity is an RNAi-inducing entioty such as an siRNA or shRNA. As mentioned above, RNAi-inducing agents can be administered directly to the respiratory system either in naked form or with a delivery agent by inhalation through the nose or mouth and into the lungs. In certain embodiments the RNAi-inducing agent is administered in an amount effective to treat or prevent a condition that affects the respiratory system, such as a respiratory virus infection, while resulting in minimal absorption into the blood and thus minimal systemic delivery of the RNAi-inducing agent. In certain embodiments of the invention the extent of absorption into the blood is such that no clinically significant effects are observed in an organ or tissue outside the respiratory system when the RNAi agent is administered at a dose that is effective in the lung.

[0282] In particular, the invention provides dry powder compositions comprising RNAi-inducing entities, preferably RNAi-inducing agents. The inventive agents are preferably delivered in the form of an aerosol spray from a pressured container or dispenser which contains a suitable propellant, e.g., a gas such as carbon dioxide, or a nebulizer. In certain embodiments the delivery system is suitable for delivering the composition into major airways (trachea and bronchi) of a subject and/or deeper into the lung (bronchioles and/or alveoli). In certain embodiments compositions comprising an RNAi-inducing entity are delivered using a nasal spray. Delivery agents may be included in the pharmaceutical composition. However, the inventors have also discovered that RNAi-inducing agents can effectively inhibit influenza virus when delivered to the respiratory system via the respiratory passages in the absence of specific delivery agents (Example 23). In certain embodiments RNAi-inducing agents are delivered to the lungs as a composition that consists essentially of the RNAi-inducing agent in dry form (e.g., dry powder) or in an aqueous medium that consists essentially of water, optionally also including a salt (e.g., NaCl, a phosphate salt), buffer, and/or an alcohol, e.g., as naked siRNA or shRNA.

[0283] Aerosol formulations for delivery to the airways and lung may comprise liquid or dry particles of various dimensions and properties. A dry particle composition containing particles smaller than about 1 mm in diameter is also referred to herein as a dry powder. By “dry” is meant that the composition has a relatively low liquid content, so that the particles are readily dispersible, e.g., in a dry powder inhalation device to form an aerosol or spray. By “powder” is meant a composition that consists largely or entirely of finely dispersed solid particles that are relatively free flowing and capable of being readily dispersed in an inhalation device and subsequently inhaled by a subject, e.g., a patient, preferably so that the particles can reach the alveoli of the lung, i.e., they are suitable for pulmonary delivery. Powder compositions may be characterized on the basis of various parameters such as the fine particle fraction (FPF), the emitted dose, the average particle density, and the mass median aerodynamic diameter (MMAD). Suitable methods are known in the art and are found, for example, in references 31 and 58 and in U.S. Publication Nos. 20020146373, 20030012742, and 20040092470. In certain embodiments of the invention particles having a mass mean aerodynamic diameter of between 1 μm and 25 μm, preferably between 1 μm and 10 μm, are used. In certain embodiments large porous particles having mean geometric diameters ranging between 3 and 15 μm and tap density between 0.04 and 0.6 g/cm³ are used (31, 58).

[0284] Methods for making dry particles are known in the art. Suitable methods include spray drying, spray-freeze drying, phase separation, single or double emulsion solvent evaporation, solvent extraction, and simple and complex coacervation. Particulate compositions can also be made using granulation, extrusion, and/or spheronization. Methods suitable for preparing dry powder oligonucleotide formulations are known in the art. See, e.g., U.S. Publication No. 20040092470. The methods employed preferably do not greatly reduce the physical integrity and ability of the nucleic acid to inhibit a target transcript. It is desirable to avoid extremes of temperature or pH that are known to result in significant degradation of nucleic acids. It will be appreciated that in general the extent of degradation may be a function of both the particular conditions and the time over which the nucleic acid is exposed to the conditions, such that minimizing the duration of exposure may be desirable and may allow more extreme conditions to be used. Compositions can be tested to determine whether the method selected is appropriate in terms of retaining sufficient efficacy. Preferably a selected formulation method results in a composition in which the portion consisting of the nucleic acid has at least 10% preferably at least 20%, 50%, or more of the level of activity of the input nucleic acid.

[0285] The conditions used in preparing the particles may be selected to yield particles of a desired size or property (e.g., hydrophobicity, hydrophilicity, external morphology, “stickiness”, shape, etc.). The method of preparing the particle and the conditions (e.g., solvent, temperature, concentration, air flow rate, etc.) used may also depend on the particular active agents and other components included in the composition. If the particles prepared by any of the above methods have a size range outside of the desired range, the particles can be sized, for example, using a sieve, by milling, etc. Combinations of methods may be employed.

[0286] The dry powders may consist essentially of one or more RNAi-inducing agents. In certain embodiments the formulation includes one or more additional agents, e.g., stabilizing agents, delivery-enhancing agents such as those described above, excipients, etc. The term “excipient”, as used herein, refers to a substance that is present in a formulation of the invention other than an active agent or delivery-enhancing agent. Suitable excipients for pulmonary delivery are known in the art. Any of a large number of art-recognized compounds may be included in the inventive formulations. In general, compositions having concentrations of between 0.1% and 100% active agent (i.e., RNAi-inducing agent) by weight may be used.

[0287] Methods for testing particles, e.g., for ability to reduce target transcript levels and/or inhibit influenza virus production are described in Example 10. Similar methods may be used for any of the inventive aerosol formulations. Dry particle compositions may be dissolved in a suitable solvent and delivered as liquid aerosols or by other suitable delivery means.

[0288] Liquid particles can also be delivered, e.g., as aerosol formulations. In general, size ranges for such particles may be similar to those described above for dry particles. In certain embodiments the liquid particles are between approximately 0.5-5 μm for respiratory delivery, though smaller or larger particles could also be used. Suitable aqueous vehicles include water or saline, optionally including an alcohol. Additional considerations for pulmonary delivery are discussed in Bisgaard, H., et al., (eds.), Drug Delivery to the Lung, Vol. 26 in “Lung Biology in Health and Disease”, Marcel Dekker, New York, 2002.

[0289] Particles comprising the inventive RNAi-inducing agents can also be administered intravenously, if desired. For intravenous delivery, sizes of approximately 10 nm-50 μm are generally preferred.

[0290] VIII. Therapeutic Applications

[0291] Compositions comprising the RNAi-inducing entites of the present invention may be used to inhibit or reduce respiratory virus infection or replication. In such applications, an effective amount of an inventive composition is delivered to a cell or organism prior to, simultaneously with, or after exposure to a virus, e.g., an influenza virus. Preferably, the amount of the RNAi-inducing entity is sufficient to reduce or delay one or more symptoms of infection. For purposes of description this section will often refer to inventive siRNAs, but the invention encompasses similar applications for other RNAi-inducing entities targeted to viral transcripts. It will also be appreciated that influenza virus is used herein as an example, but the methods may be applied to any of a wide range of other respiratory viruses.

[0292] Inventive compositions may comprise a single species of RNAi-inducing agents targeted to a single site in a single influenza transcript, or may comprise a plurality of different species, targeted to one or more sites in one or more influenza transcripts. In some embodiments of the invention, it will be desirable to utilize compositions containing collections of different RNAi-inducing agents (e.g., multiple different siRNAs) targeted to different influenza genes. For example, it may be desirable to attack the virus at multiple points in the viral life cycle using a variety of siRNAs directed against different viral transcripts. According to certain embodiments of the invention the composition contains an siRNAi targeted to each segment.

[0293] In certain embodiments the composition comprises 2, 3, 4, 5, 6, 7, 8, 9, or 10 different RNAi-inducing agent species, e.g., 2, 3, 4, 5, 6, 7, 8, 9, or 10 different siRNAs. In certain embodiments of the invention the RNAi-inducing agents are targeted to portions of the influenza virus genome having sequences selected from the group consisting of SEQ ID NOs: 272-380. In certain embodiments of the invention the RNAi-inducing agents are targeted portions of the influenza virus genome having sequences selected from the group consisting of any selected subset of SEQ ID NOs: 272-380. All such subsets are included herein for any and all purposes, even if not explicitly set forth.

[0294] In certain embodiments of the invention the composition comprises at least one RNAi-inducing agent targeted to PA and at least one RNAi-inducing agent targeted to another influenza virus gene, e.g., NP, PB1, or PB2. In certain embodiments of the invention the composition comprises at least one RNAi-inducing agent targeted to PB1 and at least one RNAi-inducing agent targeted to another influenza virus gene, e.g., NP, PA, or PB2. In certain embodiments of the invention the composition comprises at least one RNAi-inducing agent targeted to PB2 and at least one RNAi-inducing agent targeted to another influenza virus gene, e.g., NP, PB1, or PA. In certain embodiments of the invention the composition comprises at least one RNAi agent targeted to NP and at least one RNAi-inducing agent targeted to another influenza virus gene, e.g., PA, PB1, or PB2.

[0295] According to certain embodiments of the invention, inventive siRNA compositions may contain more than one siRNA species targeted to a single viral transcript. To give but one example, it may be desirable to include at least one siRNA targeted to coding regions of a target transcript and at least one siRNA targeted to the 3′ UTR. This strategy may provide extra assurance that products encoded by the relevant transcript will not be generated because at least one siRNA in the composition will target the transcript for degradation while at least one other inhibits the translation of any transcripts that avoid degradation.

[0296] Thus the invention encompasses combinations of inventive RNAi-inducing entities including, but not limited to, approaches in which multiple RNAi-inducing agents, e.g., multiple siRNAs or shRNAs are administered and approaches in which a single vector directs synthesis of siRNAs that inhibit multiple influenza virus transcripts or of RNAs that may be processed to yield a plurality of siRNAs. See Example 11 for further details. According to certain embodiments of the invention the composition includes an RNAi-inducing agent targeted to at least one influenza virus A transcript and an RNAi-inducing agent targeted to at least one influenza virus B transcript. In certain embodiments the composition comprises an RNAi-inducing agent targeted to both an influenza A virus transcript and an influenza B virus transcript. According to certain embodiments of the invention the composition comprises multiple siRNAs having different sequences that target the same portion of a particular segment. According to certain embodiments of the invention the composition comprises multiple RNAi-inducing agents that inhibit different influenza virus strains or subtypes

[0297] Influenza viruses undergo both antigenic shift and antigenic drift, and resistance to therapeutic agents may arise. It may expected that, after an inventive composition has been in use for some time, mutation and/or reassortment may occur so that a variant that is not inhibited by the particular RNAi-inducing agents provided may emerge. The present invention therefore contemplates evolving therapeutic regimes. For example, one or more new RNAi-inducing agents can be selected in a particular case in response to a particular mutation or reassortment. For instance, it would often be possible to design a new RNAi-inducing agent identical to the original except incorporating whatever mutation had occurred or targeting a newly acquired RNA segment; in other cases, it will be desirable to target a new sequence within the same transcript; in yet other cases, it will be desirable to target a new transcript entirely.

[0298] It will often be desirable to combine the administration of inventive RNAi-inducing agents with one or more other anti-viral agents in order to inhibit, reduce, or prevent one or more symptoms or characteristics of infection. In certain preferred embodiments of the invention, the inventive RNAi-inducing agents are combined with one or more other antiviral agents such as NA inhibitors, M inhibitors, etc. Examples include amantadine or rimantadine and/or zanamivir, oseltamivir, peramivir (BCX-1812, RWJ-270201) Ro64-0796 (GS 4104) or RWJ-270201. However, the administration of the inventive RNAi-inducing agent compositions may also be combined with one or more of any of a variety of agents including, for example, influenza vaccines (e.g., conventional vaccines employing influenza viruses or viral antigens as well as DNA vaccines) of which a variety are known. See Palese, P. and García-Sastre, 2002; Cheung and Lieberman, 2002, Lèuscher-Mattli, 2000; and Stiver, 2003, for further information.

[0299] In different embodiments of the invention the RNAi-inducing agents are present in the same mixture as the other agent(s) or the treatment regimen for an individual includes both RNAi-inducing agents and the other agent(s), not necessarily delivered in the same mixture or at the same time. Thus, as used herein, the term “combination” is not intended to indicate that compounds must be present in, or administered to a subject as, a single composition of matter, e.g., as part of the same dosage unit (e.g., in the same aerosol formulation, particle composition, tablet, capsule, pill, solution, etc.) although they may be. Instead, in certain embodiments of the invention the agents are administered individually but concurrently. As used herein the term “coadministration” or “concurrent administration” of two or more compounds is not intended to indicate that the compounds must be administered at precisely the same time. In general, compounds are coadministered or administered concurrently if they are present within the body at the same time in less than de minimis quantities. Accordingly, the compounds may, but need not be, administered together as part of a single composition. In addition, the compounds may, but need not be, administered simultaneously (e.g., within less than 5 minutes, or within less than one minute) or within a short time of one another (e.g., less than an hour, less than 30 minutes, less than 10 minutes, approximately 5 minutes apart). According to various embodiments of the invention compounds administered within such time intervals may be considered to be administered at substantially the same time. One of ordinary skill in the art will be able to readily determine an appropriate time interval between administration of the compounds so that they will each be present at more than de minimis levels within the body or, preferably, at effective concentrations within the body.

[0300] The inventive RNAi-inducing agents and vectors offer a complementary strategy to vaccination and may be administered to individuals who have or have not been vaccinated with any of the various vaccines currently available or under development (reviewed in Palese, P. and García-Sastre, A., J. Clin. Invest., 110(1): 9-13, 2002). Current vaccine formulations in the United States contain inactivated virus and must be administered by intramuscular injection. The vaccine is tripartite and contains representative strains from both subtypes of influenza A that are presently circulating (H3N2 and H1N1), in addition to an influenza B type. Each season specific recommendations identify particular strains for use in that season's vaccines. Other vaccine approaches include cold-adapted live influenza virus, which can be administered by nasal spray; genetically engineered live influenza virus vaccines containing deletions or other mutations in the viral genome; replication-defective influenza viruses, and DNA vaccines, in which plasmid DNA encoding one or more of the viral proteins is administered either intramuscularly or topically (see, e.g., Macklin, M. D., et al., J. Virol,72(2):1491-6, 1998; Illum, L., et al., Adv Drug Deliv Rev, 51(1-3):81-96, 2001; Ulmer, J., Vaccine, 20:S74-S76, 2002). Immunocompromised patients and elderly individuals may gain particular benefit from RNAi-based therapeutics since they may experience reduced efficacy of influenza virus vaccines.

[0301] In some embodiments of the invention, it may be desirable to target administration of inventive compositions to cells infected with influenza virus, or at least to cells susceptible of influenza virus infection (e.g., cells expressing sialic acid-containing receptors). In other embodiments, it will be desirable to have available the greatest breadth of delivery options.

[0302] As noted above, inventive therapeutic protocols involve administering an effective amount of an RNAi-inducing agent or vector prior to, simultaneously with, or after exposure to influenza virus. For example, uninfected individuals may be “immunized” with an inventive composition prior to exposure to influenza; at risk individuals (e.g., the elderly, immunocompromised individuals, persons who have recently been in contact with someone who is suspected, likely, or known to be infected with influenza virus, etc.) can be treated substantially contemporaneously with exposure, e.g., within 2 hours or less following exposure. In other embodiments a subject is treated at a later time, e.g., within 2-12, 12-24, 24-36, or 36-48 hours, following a suspected or known exposure. The subject may be symptomatic or asymptomatic. In certain embodiments the subject is protected by administration of an RNAi-inducing agent or vector up to 48 hours, up to 24 hours, up to 12 hours, up to 3 hours, etc., before an exposure. Of course individuals suspected or known to be infected may receive inventive treatment at any time.

[0303] Certain preferred influenza virus inhibitors inhibit viral replication, so that the level of replication is lower in a cell containing the inhibitor than in a control cell not containing the inhibitor by at least about 2 fold, preferably at least about 4 fold, more preferably at least about 8 fold, 16 fold, 64 fold, 100 fold, 200 fold, or to an even greater degree. Certain preferred influenza virus inhibitors prevent (e.g., reduce to undetectable levels) or significantly reduce viral replication (e.g., 10% or less, 25% of less, 50% or less, 75%, or less, relative to the level that would occur in the absence of the RNAi-inducing agent) for at least 24 hours, at least 36 hours, at least 48 hours, or about 60 hours following administration of the agent and/or infection.

[0304] In certain embodiments of the invention a sustained release preparation is used for prophylactic purposes, e.g., a formulation that releases a sufficient amount of active agent to protect a subject from influenza virus infection, or to lessen the symptoms of such infection over a period of time. For example, the formulation may release an effective amount of agent over a period of several days, a week, 1-2 weeks, or longer. Biodegradable polymeric delivery systems comprising the RNAi-inducing agent or vector can be used.

[0305] Thus the RNAi-inducing entities of the invention are therapeutically useful in at least 3 distinct situations: (i) An RNAi-inducing entity may be administered to a subject who is not suspected or known to have been exposed to influenza virus. In such a situation the RNAi-inducing entity preferably prevents the development of a clinically significant infection, or lessens its severity; (ii) An RNAi-inducing entity may be administered to a subject who is suspected or known to have been exposed to influenza virus, e.g., within a preceding time interval of up to a week. The RNAi-inducing entity preferably prevents the development of a clinically significant infection, or lessens its severity. (iii) An RNAi-inducing entity may be administered to a subject who has become clinically ill. The RNAi-inducing entity inhibits influenza virus replication and preferably lessens the severity and/or duration of at least one symptom of influenza virus infection. Subjects who have an infection of the upper respiratory tract, lower respiratory tract, or both, can be treated. In certain embodiments of the invention the subject has viral pneumonia as a result of influenza virus infection.

[0306] In certain embodiments of the invention gene therapy is used to prevent influenza or to treat an individual who is already ill. Gene therapy protocols may involve administering an effective amount of a gene therapy vector capable of directing expression of an inhibitory RNAi-inducing agent to a subject either before, substantially contemporaneously, with, or after influenza virus infection.

[0307] As mentioned above, influenza viruses infect a wide variety of species in addition to humans. The present invention includes the use of the inventive compositions for the treatment of nonhuman species, particularly species such as chickens, swine, and horses.

[0308] IX. Pharmaceutical Formulations

[0309] As discussed above, inhalational delivery of the RNAi-inducing entities is preferred in certain embodiments of the invention, while intravenous delivery is preferred in other embodiments of the invention. While inhalational delivery may be more suitable for patients who are in relatively good health, intravenous delivery may be more suitable for individuals who are unable to mount an adequate inspiratory effort and/or suffer from conditions that may impede effective delivery via the respiratory route (e.g., excessive mucus production; situations in which portions of the lung are consolidated due to bacterial infection or occluded by scar tissue, etc.) or in which it is desired to maintain a relatively constant concentration of the agent.

[0310] However, inventive compositions may be formulated for delivery by any available route including, but not limited to parenteral (e.g., intravenous), intradermal, subcutaneous, oral, nasal, bronchial, ophthalmic, transdermal (topical), transmucosal, rectal, and vaginal routes. Preferred routes of delivery include parenteral, transmucosal, nasal, bronchial, and oral. Inventive pharmaceutical compositions typically include an RNAi-inducing agent or a vector that will result in production of an RNAi-inducing agent after delivery, in combination with a pharmaceutically acceptable carrier. As used herein the language “pharmaceutically acceptable carrier” includes solvents, dispersion media, coatings, antibacterial and antifungal agents, isotonic and absorption delaying agents, and the like, compatible with pharmaceutical administration. Supplementary active compounds can also be incorporated into the compositions.

[0311] A pharmaceutical composition is formulated to be compatible with its intended route of administration. Solutions or suspensions used for parenteral (e.g., intravenous), intramuscular, intradermal, or subcutaneous application can include the following components: a sterile diluent such as water for injection, saline solution, fixed oils, polyethylene glycols, glycerine, propylene glycol or other synthetic solvents; antibacterial agents such as benzyl alcohol or methyl parabens; antioxidants such as ascorbic acid or sodium bisulfite; chelating agents such as ethylenediaminetetraacetic acid; buffers such as acetates, citrates or phosphates and agents for the adjustment of tonicity such as sodium chloride or dextrose. pH can be adjusted with acids or bases, such as hydrochloric acid or sodium hydroxide. The parenteral preparation can be enclosed in ampoules, disposable syringes or multiple dose vials made of glass or plastic.

[0312] Pharmaceutical compositions suitable for injectable use typically include sterile aqueous solutions (where water soluble) or dispersions and sterile powders for the extemporaneous preparation of sterile injectable solutions or dispersion. For intravenous administration, suitable carriers include physiological saline, bacteriostatic water, Cremophor EL™ (BASF, Parsippany, N.J.) or phosphate buffered saline (PBS). In all cases, the composition should be sterile and should be fluid to the extent that easy syringability exists. Preferred pharmaceutical formulations are stable under the conditions of manufacture and storage and must be preserved against the contaminating action of microorganisms such as bacteria and fungi. In general, the relevant carrier can be a solvent or dispersion medium containing, for example, water, ethanol, polyol (for example, glycerol, propylene glycol, and liquid polyethylene glycol, and the like), and suitable mixtures thereof. The proper fluidity can be maintained, for example, by the use of a coating such as lecithin, by the maintenance of the required particle size in the case of dispersion and by the use of surfactants. Prevention of the action of microorganisms can be achieved by various antibacterial and antifungal agents, for example, parabens, chlorobutanol, phenol, ascorbic acid, thimerosal, and the like. In many cases, it will be preferable to include isotonic agents, for example, sugars, polyalcohols such as manitol, sorbitol, sodium chloride in the composition. Prolonged absorption of the injectable compositions can be brought about by including in the composition an agent which delays absorption, for example, aluminum monostearate and gelatin.

[0313] Sterile injectable solutions can be prepared by incorporating the active compound in the required amount in an appropriate solvent with one or a combination of ingredients enumerated above, as required, followed by filtered sterilization. Preferably solutions for injection are free of endotoxin. Generally, dispersions are prepared by incorporating the active compound into a sterile vehicle which contains a basic dispersion medium and the required other ingredients from those enumerated above. In the case of sterile powders for the preparation of sterile injectable solutions, the preferred methods of preparation are vacuum drying and freeze-drying which yields a powder of the active ingredient plus any additional desired ingredient from a previously sterile-filtered solution thereof.

[0314] Oral compositions generally include an inert diluent or an edible carrier. For the purpose of oral therapeutic administration, the active compound can be incorporated with excipients and used in the form of tablets, troches, or capsules, e.g., gelatin capsules. Oral compositions can also be prepared using a fluid carrier for use as a mouthwash. Pharmaceutically compatible binding agents, and/or adjuvant materials can be included as part of the composition. The tablets, pills, capsules, troches and the like can contain any of the following ingredients, or compounds of a similar nature: a binder such as microcrystalline cellulose, gum tragacanth or gelatin; an excipient such as starch or lactose, a disintegrating agent such as alginic acid, Primogel, or corn starch; a lubricant such as magnesium stearate or Sterotes; a glidant such as colloidal silicon dioxide; a sweetening agent such as sucrose or saccharin; or a flavoring agent such as peppermint, methyl salicylate, or orange flavoring. Formulations for oral delivery may advantageously incorporate agents to improve stability within the gastrointestinal tract and/or to enhance absorption.

[0315] Systemic administration of any of the RNAi-inducing entities of the invention can also be by transmucosal or transdermal means. For transmucosal or transdermal administration, penetrants appropriate to the barrier to be permeated are used in the formulation. Such penetrants are generally known in the art, and include, for example, for transmucosal administration, detergents, bile salts, and fusidic acid derivatives. Transmucosal administration can be accomplished through the use of nasal sprays or suppositories. For transdermal administration, the active compounds are formulated into ointments, salves, gels, or creams as generally known in the art. The compounds can also be prepared in the form of suppositories (e.g., with conventional suppository bases such as cocoa butter and other glycerides) or retention enemas for rectal delivery.

[0316] In addition to the delivery agents described above, in certain embodiments of the invention, the active entities are prepared with carriers that will protect the compound against rapid elimination from the body, such as a controlled release formulation, including implants and microencapsulated delivery systems. Biodegradable, biocompatible polymers can be used, such as ethylene vinyl acetate, polyanhydrides, polyglycolic acid, collagen, polyorthoesters, and polylactic acid. Sustained release formulations, which may release active agents over a period of hours, days, weeks, or even longer, may be particularly useful for prophylactic purposes. Methods for preparation of such formulations will be apparent to those skilled in the art. The materials can also be obtained commercially from Alza Corporation and Nova Pharmaceuticals, Inc. Liposomal suspensions (including liposomes targeted to infected cells with monoclonal antibodies to viral antigens) can also be used as pharmaceutically acceptable carriers. These can be prepared according to methods known to those skilled in the art, for example, as described in U.S. Pat. No. 4,522,811.

[0317] It is advantageous to formulate oral or parenteral compositions in dosage unit form for ease of administration and uniformity of dosage. Dosage unit form as used herein refers to physically discrete units suited as unitary dosages for the subject to be treated; each unit containing a predetermined quantity of active compound calculated to produce the desired therapeutic effect in association with the required pharmaceutical carrier.

[0318] Toxicity and therapeutic efficacy of such compounds can be determined by standard pharmaceutical procedures in cell cultures or experimental animals, e.g., for determining the LD₅₀ (the dose lethal to 50% of the population) and the ED₅₀ (the dose therapeutically effective in 50% of the population). The dose ratio between toxic and therapeutic effects is the therapeutic index and it can be expressed as the ratio LD₅₀/ED₅₀. Compounds which exhibit high therapeutic indices are preferred. While compounds that exhibit toxic side effects can be used, care should be taken to design a delivery system that targets such compounds to the site of affected tissue in order to minimize potential damage to uninfected cells and, thereby, reduce side effects.

[0319] The data obtained from cell culture assays and animal studies can be used in formulating a range of dosage for use in humans. The dosage of such compounds lies preferably within a range of circulating concentrations that include the ED₅₀ with little or no toxicity. The dosage can vary within this range depending upon the dosage form employed and the route of administration utilized. For any compound used in the method of the invention, the therapeutically effective dose can be estimated initially from cell culture assays. A dose can be formulated in animal models to achieve a circulating plasma concentration range that includes the IC₅₀ (i.e., the concentration of the test compound which achieves a half-maximal inhibition of symptoms) as determined in cell culture. Such information can be used to more accurately determine useful doses in humans. Levels in plasma can be measured, for example, by high performance liquid chromatography.

[0320] A therapeutically effective amount of a pharmaceutical composition typically ranges from about 0.001 to 30 mg/kg body weight, preferably about 0.01 to 25 mg/kg body weight, more preferably about 0.1 to 20 mg/kg body weight, and even more preferably about 1 to 10 mg/kg, 2 to 9 mg/kg, 3 to 8 mg/kg, 4 to 7 mg/kg, or 5 to 6 mg/kg body weight. The pharmaceutical composition can be administered at various intervals and over different periods of time as required, e.g., multiple times per day, daily, every other day, once a week for between about 1 to 10 weeks, between 2 to 8 weeks, between about 3 to 7 weeks, about 4, 5, or 6 weeks, etc. The skilled artisan will appreciate that certain factors can influence the dosage and timing required to effectively treat a subject, including but not limited to the severity of the disease or disorder, previous treatments, the general health and/or age of the subject, and other diseases present. Generally, treatment of a subject with an RNAi-inducing entity as described herein, can include a single treatment or, in many cases, can include a series of treatments.

[0321] Exemplary doses include milligram or microgram amounts of the inventive nucleic acid, e.g., siRNA, per kg of subject or sample weight (e.g., about 1 μg/kg per kilogram to about 500 mg/kg per kilogram, about 100 mg/kg to about 5 mg/kg, or about I mg/kg to about 50 mg/kg) For local administration (e.g., intranasal), doses much smaller than these may be used.

[0322] It is furthermore understood that appropriate doses of an RNAi-inducing agent depend upon the potency of the agent and may optionally be tailored to the particular recipient, for example, through administration of increasing doses until a preselected desired response is achieved. It is understood that the specific dose level for any particular animal subject may depend upon a variety of factors including the activity of the specific compound employed, the age, body weight, general health, gender, and diet of the subject, the time of administration, the route of administration, the rate of excretion, any drug combination, and the degree of expression or activity to be modulated.

[0323] The present invention includes the use of inventive nucleic acids, e.g., siRNA or shRNA-containing compositions for treatment of nonhuman animals including, but not limited to, horses, swine, and birds. Accordingly, doses and methods of administration may be selected in accordance with known principles of veterinary pharmacology and medicine. Guidance may be found, for example, in Adams, R. (ed.), Veterinary Pharmacology and Therapeutics, 8^{th} edition, Iowa State University Press; ISBN: 0813817439; 2001.

[0324] Inventive pharmaceutical compositions can be included in a container, pack, or dispenser together with instructions for administration.

### EXEMPLIFICATION

### Example 1

### Design of siRNAs to Inhibit Influenza A Virus

[0325] Genomic sequences from a set of influenza virus strains were compared in their positive sense form, and regions of each segment that were most conserved were identified. This group of viruses included viruses derived from bird, swine, horse, and human. To perform the comparison the sequences of individual segments from 12 to 15 strains of influenza A virus from different animal (nonnhuman) species isolated in different years and from 12 to 15 strains from humans isolated in different years were aligned. The strains were selected to encompass a wide variety of HA and NA subtypes. Regions that differed either by 0, 1, or 2 nucleotides among the different strains were selected. For example, the following strains were used for selection of siRNAs that target the NP transcript, accession number before each strain name refers to the accession number of the NP sequence and the lengths of the sequence that were compared are indicated by nucleotide number.

[0326] The order of the entries in the following list is: accession number, strain name, length of sequence compared, year, subtype. Accession numbers for the other genome segments differ but may be found readily in databases mentioned above. Strains compared were:

| | | | | |
|---|---|---|---|---|
| NC_002019 | A/Puerto Rico/8/34 | 1565 | 1934 | H1N1 |
| M30746 | A/Wilson-Smith/33 | 1565 | 1933 | H1N1 |
| M81583 | A/Leningrad/134/47/57 | 1566 | 1957 | H2N2 |
| AF348180 | A/Hong Kong/1/68 | 1520 | 1968 | H3N2 |
| L07345 | A/Memphis/101/72 | 1565 | 1972 | H3N2 |
| D00051 | A/Udorn/307/72 | 1565 | 1972 | H3N2 |
| L07359 | A/Guangdong/38/77 | 1565 | 1977 | H3N2 |
| M59333 | A/Ohio/201/83 | 1565 | 1983 | H1N1 |
| L07364 | A/Memphis/14/85 | 1565 | 1985 | H3N2 |
| M76610 | A/Wisconsin/3623/88 | 1565 | 1988 | H1N1 |
| U71144 | A/Akita/1/94 | 1497 | 1994 | H3N2 |
| AF084277 | A/Hong Kong/483/97 | 1497 | 1997 | H5N1 |
| AF036359 | A/Hong Kong/156/97 | 1565 | 1997 | H5N1 |
| AF250472 | A/Aquatic bird/Hong Kong/M603/ | 1497 | 1998 | H11N1 |
| | 98 | | | |
| ISDN13443 | A/Sydney/274/2000 | 1503 | 2000 | H3N2 |
| M63773 | A/Duck/Manitoba/1/53 | 1565 | 1953 | H10N7 |
| M63775 | A/Duck/Pennsylvania/1/69 | 1565 | 1969 | H6N1 |
| M30750 | A/Equine/London/1416/73 | 1565 | 1973 | H7N7 |
| M63777 | A/Gull/Maryland/5/77 | 1565 | 1977 | H11N9 |
| M30756 | A/gull/Maryland/1815/79 | 1565 | 1979 | H13N6 |
| M63785 | A/Mallard/Astrakhan(Gurjev)/263/ | 1565 | 1982 | H14N5 |
| | 82 | | | |
| M27520 | A/whale/Maine/328/84 | 1565 | 1984 | H13N2 |
| M63768 | A/Swine/Iowa/17672/88 | 1565 | 1988 | H1N1 |
| Z26857 | A/turkey/Germany/3/91 | 1554 | 1991 | H1N1 |
| U49094 | A/Duck/Nanchang/1749/92 | 1407 | 1992 | H11N2 |
| AF156402 | A/Chicken/Hong Kong/G9/97 | 1536 | 1997 | H9N2 |
| AF285888 | A/Swine/Ontario/01911-1/99 | 1532 | 1999 | H4N6 |

[0327] FIG. 9 shows an example of the selection of certain regions of the PA transcript that are highly conserved among six influenza A variants (all of which have a human host of origin), in which regions are considered highly conserved if they differ by either 0, 1, or 2 nucleotides. (Note that the sequences are listed as DNA rather than RNA and therefore contain T rather than U.) The sequence of strain A/Puerto Rico/8/34 (H1N1) was selected as the base sequence, i.e., the sequence with which the other sequences were compared. The other members of the set were A/WSN/33 (H1N1), A/Leningrad/134/17/57 (H2N2), A/Hong Kong/1/68 (H3N2), A/Hong Kong/481/97 (H5N1), and A/Hong Kong/1073/99 (H9N2). The figure presents a multiple sequence alignment produced by the computer program CLUSTAL W (1.4). Nucleotides that differ from the base sequence are shaded.

[0328] FIG. 10 shows an example of the selection of certain regions of the PA transcript that are highly conserved among five influenza A variants (all of which have different animal hosts of origin) and also among two strains that have a human host of origin, in which regions are considered highly conserved if they differ by either 0, 1, or 2 nucleotides. (Note that the sequences are listed as DNA rather than RNA and therefore contain T rather than U.) The sequence of strain A/Puerto Rico/8/34 (H1N1) was selected as the base sequence, i.e., the sequence with which the other sequences were compared. The other members of the set were A/WSN/33 (H1N1), A/chicken/FPV/Rostock/34 (H7N1), A/turkey/California/189/66 (H9M2), A/Equine/London/1416/73 (H7N7), A/gull/Maryland/704/77 (H13N6), and A/swine/Hong Kong/9/98 (H9N2). Nucleotides that differ from the base sequence are shaded.

[0329] Note that in the sequence comparisons in FIGS. 9 and 10 many different highly conserved regions can be selected since large portions of the sequence meet the criteria for being highly conserved. However, sequences that have AA at the 5′ end provide for a 19 nucleotide core sequence and a 2 nucleotide 3′ UU overhang in the complementary (antisense) siRNA strand. Therefore regions that were highly conserved were scanned to identify 21 nucleotide portions that had AA at their 5′ end so that the complementary nucleotides, which are present in the antisense strand of the siRNA, are UU. For example, each of the shaded sequences has AA at its 5′ end. Note that the UU 3′ overhang in the antisense strand of the resulting siRNA molecule may be replaced by TT or dTdT as shown in Table 2. However, it is not necessary that the 2 nt 3′ overhang of the antisense strand is UU.

[0330] Further illustrating the method, FIG. 12 shows a sequence comparison between a portion of the 3′ region of NP sequences among twelve influenza A virus subtypes or isolates that have either a human or animal host of origin. The underlined sequence and the corresponding portions of the sequences below the underlined sequence were used to design siRNA NP-1496 (see below). These sequences are indicated in FIG. 12. The base sequence is the sequence of strain A/Puerto Rico/8/34. Shaded letters indicate nucleotides that differ from the base sequence.

[0331] Table 1A lists 21-nucleotide regions that are highly conserved among a set of influenza virus sequences for each of the viral gene segments. The sequences in Table 1A are listed in 5′ to 3′ direction according to the sequence present in viral mRNA except that T is used instead of U. The numbers indicate the locations of the sequences in the viral genome. For example, PB2-117/137 denotes a sequence extending from position 117 to position 137 in segment PB2. Many of the sequences meet the additional criterion that they have AA at their 5′ end so as to result in a 3′ UU overhang in the complementary strand. For the PA segment, in cases where a one or two nucleotide difference existed, the sequences of the siRNAs were based on the A/PR8/34 (H1N1) strain except for sequence PA-2087/2107 AAGCAATTGAGGAGTGCCTGA (SEQ ID NO: 30), which was based on the A/WSN/33(H1N1) strain. Note that at position 20 five of the six sequences contain a G while the base sequence (accession number NC_{—}002019) contains an A. Thus in this case the sequence of the base sequence was not used for siRNA design. The terms PA-2087 and PA-2087(G) are used interchangeably herein.

[0332] To design siRNAs based on the sequences listed in Table 1A, nucleotides 3-21 were selected as the core regions of siRNA sense strand sequences, and a two nt 3′ overhang consisting of dTdT was added to each resulting sequence. A sequence complementary to nucleotides 1-21 of each sequence was selected as the corresponding antisense strand. For example, to design an siRNA based on the highly conserved sequence PA-44/64, i.e., AATGCTTCAATCCGATGATTG (SEQ ID NO: 22) a 19 nt core region having the sequence TGCTTCAATCCGATGATTG (SEQ ID NO: 109) was selected. A two nt 3′ overhang consisting of dTdT was added, resulting (after replacement of T by U) in the sequence 5′-UGCUUCAAUCCGAUGAUUGdTdT-3′ (SEQ ID NO: 79), which was the sequence of the siRNA sense strand. The sequence of the corresponding antisense siRNA strand sequence is complementary to SEQ ID NO: 22, i.e., CAAUCAUCGGAUUGAAGCAdTdT (SEQ ID NO: 80) where T has been replaced by U except for the 2 nt 3′ overhang.

[0333] Table 1B lists siRNAs designed based on additional highly conserved regions of influenza virus transcripts. The first 19 nt sequences of the sequences indicated as “sense strand” in Table 1B are sequences of highly conserved regions. The sense strand siRNA sequences are shown with a dTdT overhang at the 3′ end, which does not correspond to influenza virus sequences and is an optional feature of the siRNA. Corresponding antisense strands are also shown, also incorporating a dTdT overhang at the 3′ end as an optional feature. Nomenclature is as in Table 1B. For example, PB2-4/22 sense indicates an siRNA whose sense strand has the sequence of nucleotides 4-22 of the PB2 transcript. PB2-4/22 antisense indicates the complementary antisense strand corresponding to PB2-4/22 sense. For siRNA that target sites in a transcript that span a splice site, the positions within the unspliced transcript are indicated. For example, M-44-52/741-750 indicates that nucleotides corresponding to 44-52 and 741-750 of the genomic sequences are targeted in the spliced mRNA.

[0334] Shaded areas in FIGS. 9 and 10 indicate some of the 21 nucleotide regions that meet the criteria for being highly conserved. siRNAs were designed based on these sequences as described above. The actual siRNA sequences that were tested are listed in Table 2.

TABLE 1A

Conserved regions for design of siRNA to
interfere with influenza A virus infection

Segment 1: PB2

| | | |
|---|---|---|
| PB2-117/137 | AATCAAGAAGTACACATCAGG | (SEQ ID NO:1) |
| PB2124/144 | AAGTACACATCAGGAAGACAG | (SEQ ID NO:2) |
| PB2-170/190 | AATGGATGATGGCAATGAAAT | (SEQ ID NO:3) |
| PB2-195/215 | AATTACAGCAGACAAGAGGAT | (SEQ ID NO:4) |
| PB2-1614/1634 | AACTTACTCATCGTCAATGAT | (SEQ ID NO:5) |
| PB2-1942/1962 | AATGTGAGGGGATCAGGAATG | (SEQ ID NO:6) |
| PB2-2151/2171 | AAGCATCAATGAACTGAGCAA | (SEQ ID NO:7) |
| PB2-2210/2230 | AAGGAGACGTGGTGTTGGTAA | (SEQ ID NO:8) |
| PB2-2240/2260 | AACGGGACTCTAGCATACTTA | (SEQ ID NO:9) |
| PB2-2283/2303 | AAGAATTCGGATGGCCATCAA | (SEQ ID NO:10) |
| Segment 2: PB1 | | |
| PB1-6/26 | AAGCAGGCAAACCATTTGAAT | (SEQ ID NO:11) |
| PB1-15/35 | AACCATTTGAATGGATGTCAA | (SEQ ID NO:12) |
| PB1-34/54 | AATCCGACCTTACTTTTCTTA | (SEQ ID NO:13) |
| PB1-56/76 | AAGTGCCAGCACAAAATGCTA | (SEQ ID NO:14) |
| PB1-129/149 | AACAGGATACACCATGGATAC | (SEQ ID NO:15) |
| PB1-1050/1070 | AATGTTCTCAAACAAAATGGC | (SEQ ID NO:16) |
| PB1-1242/1262 | AATGATGATGGGCATGTTCAA | (SEQ ID NO:17) |
| PB1-2257/2277 | AAGATCTGTTCCACCATTGAA | (SEQ ID NO:18) |
| Segment 3: PA | | |
| PA-6/26 | AAGCAGGTACTGATCCAAAAT | (SEQ ID NO:19) |
| PA-24/44 | AATGGAAGATTTTGTGCGACA | (SEQ ID NO:20) |
| PA-35/55 | TTGTGCGACAATGCTTCAATC | (SEQ ID NO:21) |
| PA-44/64 | AATGCTTCAATCCGATGATTG | (SEQ ID NO:22) |
| PA-52/72 | AATCCGATGATTGTCGAGCTT | (SEQ ID NO:23) |
| PA-121/141 | AACAAATTTGCAGCAATATGC | (SEQ ID NO:24) |
| PA-617/637 | AAGAGACAATTGAAGAAAGGT | (SEQ ID NO:25) |
| PA-711/731 | TAGAGCCTATGTGGATGGATT | (SEQ ID NO:26) |
| PA-739/759 | AACGGCTACATTGAGGGCAAG | (SEQ ID NO:27) |
| PA-995/1015 | AACCACACGAAAAGGGAATAA | (SEQ ID NO:28) |
| PA-2054/2074 | AACCTGGGACCTTTGATCTTG | (SEQ ID NO:29) |
| PA-2087/2107 | AAGCAATTGAGGAGTGCCTGA | (SEQ ID NO:30) |
| PA-2110/2130 | AATGATCCCTGGGTTTTGCTT | (SEQ ID NO:31) |
| PA-2131/2151 | AATGCTTCTTGGTTCAACTCC | (SEQ ID NO:32) |
| Segment 4: HA | | |
| HA-1119/1139 | TTGGAGCCATTGCCGGTTTTA | (SEQ ID NO:33) |
| HA-1121/1141 | GGAGCCATTGCCGGTTTTATT | (SEQ ID NO:34) |
| HA-1571/1591 | AATGGGACTTATGATTATCCC | (SEQ ID NO:35) |
| Segment 5: NP | | |
| NP-19/39 | AATCACTCACTGAGTGACATC | (SEQ ID NO:36) |
| NP-42/62 | AATCATGGCGTCCCAAGGCAC | (SEQ ID NO:37) |
| NP-231/251 | AATAGAGAGAATGGTGCTCTC | (SEQ ID NO:38) |
| NP-390/410 | AATAAGGCGAATCTGGCGCCA | (SEQ ID NO:39) |
| NP-393/413 | AAGGCGAATCTGGCGCCAAGC | (SEQ ID NO:40) |
| NP-708/728 | AATGTGCAACATTCTCAAAGG | (SEQ ID NO:41) |
| NP-1492/1512 | AATGAAGGATCTTATTTCTTC | (SEQ ID NO:42) |
| NP-1496/1516 | AAGGATCTTATTTCTTCGGAG | (SEQ ID NO:43) |
| NP-1519/1539 | AATGCAGAGGAGTACGACAAT | (SEQ ID NO:44) |
| Segment 6: NA | | |
| NA-20/40 | AATGAATCCAAATCAGAAAAT | (SEQ ID NO:45) |
| NA704/724 | GAGGACACAAGAGTCTGAATG | (SEQ ID NO:46) |
| NA-861/881 | GAGGAATGTTCCTGTTACCCT | (SEQ ID NO:47) |
| NA-901/921 | GTGTGTGCAGAGACAATTGGC | (SEQ ID NO:48) |
| Segment 7: M | | |
| M-156/176 | AATGGCTAAAGACAAGACCAA | (SEQ ID NO:49) |
| M-175/195 | AATCCTGTCACCTCTGACTAA | (SEQ ID NO:50) |
| M-218/238 | ACGCTCACCGTGCCCAGTGAG | (SEQ ID NO:51) |
| M-244/264 | ACTGCAGCGTAGACGCTTTGT | (SEQ ID NO:52) |
| M-373/393 | ACTCAGTTATTCTGCTGGTGC | (SEQ ID NO:53) |
| M-377/397 | AGTTATTCTGCTGGTGCACTT | (SEQ ID NO:54) |
| M-480/500 | AACAGATTGCTGACTCCCAGC | (SEQ ID NO:55) |
| M-584/604 | AAGGCTATGGAGCAAATGGCT | (SEQ ID NO:56) |
| M-598/618 | AATGGCTGGATCGAGTGAGCA | (SEQ ID NO:57) |
| M-686/706 | ACTCATCCTAGCTCCAGTGCT | (SEQ ID NO:58) |
| M-731/751 | AATTTGCAGGCCTATCAGAAA | (SEQ ID NO:59) |
| M-816/836 | ATTGTGGATTCTTGATCGTCT | (SEQ ID NO:60) |
| M-934/954 | AAGAATATCGAAAGGAACAGC | (SEQ ID NO:61) |
| M-982/1002 | ATTTTGTCAGCATAGAGCTGG | (SEQ ID NO:62) |
| Segment 8: NS | | |
| NS-101/121 | AAGAACTAGGTGATGCCCCAT | (SEQ ID NO:63) |
| NS-104/124 | AACTAGGTGATGCCCCATTCC | (SEQ ID NO:64) |
| NS-128/148 | ATCGGCTTCGCCGAGATCAGA | (SEQ ID NO:65) |
| NS-137/157 | GCCGAGATCAGAAATCCCTAA | (SEQ ID NO:66) |
| NS-562/582 | GGAGTCCTCATCGGAGGACTT | (SEQ ID NO:67) |
| NS-589/609 | AATGATAACACAGTTCGAGTC | (SEQ ID NO:68) |

[0335] TABLE 1B

Conserved regions for design of siRNA to interfere
with influenza A virus infection

Segment 1: PB2

| | | |
|---|---|---|
| PB2-4/22 sense | GAAAGCAGGUCAAUUAUAUdTdT | (SEQ ID NO: 190) |
| PB2-4/22 antisense | AUAUAAUUGACCUGCUUUCdTdT | (SEQ ID NO: 191) |
| PB2-12/30 sense | GUCAAUUAUAUUCAAUAUGdTdT | (SEQ ID NO: 192) |
| PB2-12/30 antisense | CAUAUUGAAUAUAAUUGACdTdT | (SEQ ID NO: 193) |
| PB2-68/86 sense | CUCGCACCCGCGAGAUACUdTdT | (SEQ ID NO: 194) |
| PB2-68/86 antisense | AGUAUCUCGCGGGUGCGAGdTdT | (SEQ ID NO: 195) |
| PB2-115/133 sense | AUAAUCAAGAAGUACACAUdTdT | (SEQ ID NO: 196) |
| PB2-115/133 antisense | AUGUGUACUUCUUGAUUAUdTdT | (SEQ ID NO: 197) |
| PB2-167/185 sense | UGAAAUGGAUGAUGGCAAUdTdT | (SEQ ID NO: 198) |
| PB2-167/185 antisense | AUUGCCAUCAUCCAUUUCAdTdT | (SEQ ID NO: 199) |
| PB2-473/491 sense | CUGGUCAUGCAGAUCUCAGdTdT | (SEQ ID NO: 200) |
| PB2-473/491 antisense | CUGAGAUCUGCAUGACCAGdTdT | (SEQ ID NO: 201) |
| PB2-956/974 sense | UAUGCAAGGCUGCAAUGGGdTdT | (SEQ ID NO: 202) |
| PB2-956/974 antisense | CCCAUUGCAGCCUUGCAUAdTdT | (SEQ ID NO: 203) |
| PB2-1622/1640 sense | CAUCGUCAAUGAUGUGGGAdTdT | (SEQ ID NO: 204) |
| PB2-1622/1640 antisense | UCCCACAUCAUUGACGAUGdTdT | (SEQ ID NO: 205) |
| Segment 2: PB1 | | |
| PB1-1124/1142 sense | AAAUACCUGCAGAAAUGCUdTdT | (SEQ ID NO: 206) |
| PB1-1124/1142 antisense | AGCAUUUCUGCAGGUAUUUdTdT | (SEQ ID NO: 207) |
| PB1-1618/1636 sense | AACAAUAUGAUAAACAAUGdTdT | (SEQ ID NO: 208) |
| PB1-1618/1636 antisense | CAUUGUUUAUCAUAUUGUUdTdT | (SEQ ID NO: 209) |
| Segment 3: PA | | |
| PA-3/21 sense | CGAAAGCAGGUACUGAUCCdTdT | (SEQ ID NO: 210) |
| PA-3/21 antisense | GGAUCAGUACCUGCUUUCGdTdT | (SEQ ID NO: 211) |
| PA-544/562 sense | AGGCUAUUCACCAUAAGACdTdT | (SEQ ID NO: 212) |
| PA-544/562 antisense | GUCUUAUGGUGAAUAGCCUdTdT | (SEQ ID NO: 213) |
| PA-587/605 sense | GGGAUUCCUUUCGUCAGUCdTdT | (SEQ ID NO: 214) |
| PA-587/605 antisense | GACUGACGAAAGGAAUCCCdTdT | (SEQ ID NO: 215) |
| PA-1438/1466 sense | GCAUCUUGUGCAGCAAUGGdTdT | (SEQ ID NO: 216) |
| PA-1438/1466 antisense | CCAUUGCUGCACAAGAUGCdTdT | (SEQ ID NO: 217) |
| PA-2175/2193 sense | GUUGUGGCAGUGCUACUAUdTdT | (SEQ ID NO: 218) |
| PA-2175/2193 antisense | AUAGUAGCACUGCCACAACdTdT | (SEQ ID NO: 219) |
| PA-2188/2206 sense | UACUAUUUGCUAUCCAUACdTdT | (SEQ ID NO: 220) |
| PA-2188/2206 antisense | GUAUGGAUAOCAAAUAGUAdTdT | (SEQ ID NO: 221) |
| Segment 5: NP | | |
| NP-14/32 sense | UAGAUAAUCACUCACUGAGdTdT | (SEQ ID NO: 222) |
| NP-14/32 antisense | CUCAGUGAGUGAUUAUCUAdTdT | (SEQ ID NO: 223) |
| NP-50/68 sense | CGUCCCAAGGCACCAAACGdTdT | (SEQ ID NO: 224) |
| NP-50/68 antisense | CGUUUGGUGCCUUGGGACGdTdT | (SEQ ID NO: 225) |
| NP-1505/1523 sense | AUUUCUUCGGAGACAAUGCdTdT | (SEQ ID NO: 226) |
| NP-1505/1523 antisense | GCAUUGUCUCCGAAGAAAUdTdT | (SEQ ID NO: 227) |
| NP-1521/1539 sense | UGCAGAGGAGUACGACAAUdTdT | (SEQ ID NO: 228) |
| NP-1521/1539 antisense | AUUGUCGUACUCCUCUGCAdTdT | (SEQ ID NO: 229) |
| NP-1488/1506 sense | GAGTAATGAAGGATCTTATdTdT | (SEQ ID NO: 230) |
| NP-1488/1506 antisense | ATAAGATCCTTCATTACTCdTdT | (SEQ ID NO: 231) |
| Segment 7: M | | |
| M-3/21 sense | CGAAAGCAGGUAGAUAUUGdTdT | (SEQ ID NO: 232) |
| M-3/21 antisense | CAAUAUCUACCUGCUUUCGdTdT | (SEQ ID NO: 233) |
| M-13/31 sense | UAGAUAUUGAAAGAUGAGUdTdT | (SEQ ID NO: 234) |
| M-13/31 antisense | ACUCAUCUUUCAAUAUCUAdTdT | (SEQ ID NO: 235) |
| M-150/158 sense | UCAUGGAAUGGCUAAAGACdTdT | (SEQ ID NO: 236) |
| M-150/158 antisense | GUCUUUAGCCAUUCCAUGAdTdT | (SEQ ID NO: 237) |
| M-172/190 sense | ACCAAUCCUGUCACCUCUGdTdT | (SEQ ID NO: 238) |
| M-172/190 antisense | CAGAGGUGACAGGAUUGGUdTdT | (SEQ ID NO: 239) |
| M-211/229 sense | UGUGUUCACGCUCACCGUGdTdT | (SEQ ID NO: 240) |
| M-211/229 antisense | CACGGUGAGCGUGAACACAdTdT | (SEQ ID NO: 241) |
| M-232/250 sense | CAGUGAGCGAGGACUGCAGdTdT | (SEQ ID NO: 242) |
| M-232/250 antisense | CUGCAGUCCUCGCUCACUGdTdT | (SEQ ID NO: 243) |
| M-255/273 sense | GACGCUUUGUCCAAAAUGCdTdT | (SEQ ID NO: 244) |
| M-255/273 antisense | GCAUUUUGGACAAAGCGUCdTdT | (SEQ ID NO: 245) |
| M-645/663 sense | GUCAGGCUAGGCAAAUGGUdTdT | (SEQ ID NO: 246) |
| M-645/663 antisense | ACCAUUUGCCUAGCCUGACdTdT | (SEQ ID NO: 247) |
| M-723/741 sense | UUCUUGAAAAUUUGCAGGCdTdT | (SEQ ID NO: 248) |
| M-723/741 antisense | GCCUGCAAAUUUUCAAGAAdTdT | (SEQ ID NO: 249) |
| M-808/826 sense | UCAUUGGGAUCUUGCACUUdTdT | (SEQ ID NO: 250) |
| M-808/826 antisense | AAGUGCAAGAUCCCAAUGAdTdT | (SEQ ID NO: 251) |
| M-832/850 sense | UGUGGAUUCUUGAUCGUCUdTdT | (SEQ ID NO: 252) |
| M-832/850 antisense | AGACGAUCAAGAAUCCACAdTdT | (SEQ ID NO: 253) |
| M-986/1004 sense | UGUCAGCAUAGAGCUGGAGdTdT | (SEQ ID NO: 254) |
| M-986/1004 antisense | CUCCAGCUCUAUGCUGACAdTdT | (SEQ ID NO: 255) |
| M-44-52/741-750 sense | GTCGAAACGCCTATCAGAAdTdT | (SEQ ID NO: 256) |
| M-44-52/741-750 antisense | UUCUGAUAGGCGUUUCGACdTdT | (SEQ ID NO: 257) |
| Segment 8: NS | | |
| NS-5/23 sense | AAAAGCAGGGUGACAAAGAdTdT | (SEQ ID NO: 258) |
| NS-5/23 antisense | UCUUUGUCACCCUGCUUUUdTdT | (SEQ ID NO: 259) |
| NS-9/27 sense | GCAGGGUGACAAAGACAUAdTdT | (SEQ ID NO: 260) |
| NS-9/27 antisense | UAUGUCUUUGUCACCCUGCdTdT | (SEQ ID NO: 261) |
| NS-543/561 sense | GGAUGUCAAAAAUGCAGUUdTdT | (SEQ ID NO: 262) |
| NS-543/561 antisense | AACUGCAUUUUUGACAUCCdTdT | (SEQ ID NO: 263) |
| NS-623/641 sense | AGAGAUUCGCUUGGAGAAGdTdT | (SEQ ID NO: 264) |
| NS-623/641 antisense | CUUCUCCAAGCGAAUCUCUdTdT | (SEQ ID NO: 265) |
| NS-642/660 sense | CAGUAAUGAGAAUGGGAGAdTdT | (SEQ ID NO: 266) |
| NS-642/660 antisense | UCUCCCAUUCUCAUUACUGdTdT | (SEQ ID NO: 267) |
| NS-831/849 sense | UUGUGGAUUCUUGAUCGUCdTdT | (SEQ ID NO: 268) |
| NS-831/839 antisense | GACGAUCAAGAAUCCACAAdTdT | (SEQ ID NO: 269) |

### Example 2

### siRNAs that Target Viral RNA Polymerase or Nucleoprotein Inhibit Influenza A Virus Production

[0336] Materials and Methods

[0337] Cell Culture. Madin-Darby canine kidney cells (MDCK), a kind gift from Dr. Peter Palese, Mount Sinai School of Medicine, New York, N.Y., were grown in DMEM medium containing 10% heat-inactivated FCS, 2 mM L-glutamine, 100 units/ml penicillin, and 100 μg/ml streptomycin. Cells were grown at 37° C., 5% CO₂. For electroporation, the cells were kept in serum-free RPMI 1640 medium. Virus infections were done in infection medium (DMEM, 0.3% bovine serum albumin (BSA, Sigma, St. Louis, Mo.), 10 mM Hepes, 100 units/ml penicillin, and 100 μg/ml streptomycin).

[0338] Viruses. Influenza viruses A/PR/8/34 (PR8) and A/WSN/33 (WSN), subtypes H1N1, kind gifts from Dr. Peter Palese, Mount Sinai School of Medicine, were grown for 48 h in 10-day-embryonated chicken eggs (Charles River laboratories, MA) at 37° C. Allantoic fluid was harvested 48 h after virus inoculation and stored at −80° C. The same virus strains and methods were used throughout the examples described herein.

[0339] siRNAs. siRNAs were designed as described above. In addition to conforming to the selection criteria described in Example 1, the siRNAs were generally designed in accordance with principles described in Technical Bulletin # 003-Revision B, “siRNA Oligonucleotides for RNAi Applications”, available from Dharmacon Research, Inc., Lafayette, Colo. 80026. Technical Bulletins #003 and #004 from Dharmacon contain a variety of information relevant to siRNA design parameters, synthesis, etc., and are incorporated herein by reference. Sense and antisense sequences that were tested are listed in Table 2.

TABLE 2
siRNA Sequences

| | |
|---|---|
| Name | siRNA sequence (5′ - 3′) |

| | |
|---|---|
| PB2-2210/2230 (sense) | GGAGACGUGGUGUUGGUAAdTdT (SEQ ID NO: 69) |
| PB2-2210/2230 (antisense) | UUACCAACACCACGUCUCCdTdT (SEQ ID NO: 70) |
| PB2-2240/2260 (sense) | CGGGACUCUAGCAUACUUAdTdT (SEQ ID NO: 71) |
| PB2-2240/2260 (antisense) | UAAGUAUGCUAGAGUCCCGdTdT (SEQ ID NO: 72) |
| PB1-6/26 (sense) | GCAGGCAAACCAUUUGAAUdTdT (SEQ ID NO: 73) |
| PB1-6/26 (antisense) | AUUCAAAUGGUUUGCCUGCdTdT (SEQ ID NO: 74) |
| PB1-129/149 (sense) | CAGGAUACACCAUGGAUACdTdT (SEQ ID NO: 75) |
| PB1-129/149 (antisense) | GUAUCCAUGGUGUAUCCUGdTdT (SEQ iD NO: 76) |
| PB1-2257/2277 (sense) | GAUCUGUUCCACCAUUGAAdTdT (SEQ ID NO: 77) |
| PB1-2257/2277 (antisense) | UUCAAUGGUGGAACAGAUCdTdT (SEQ ID NO: 78) |
| PA-44/64 (sense) | UGCUUCAAUCCGAUGAUUGdTdT (SEQ ID NO: 79) |
| PA-44/64 (antisense) | CAAUCAUCGGAUUGAAGCAdTdT (SEQ ID NO: 80) |
| PA-739/759 (sense) | CGGCUACAUUGAGGGCAAGdTdT (SEQ ID NO: 81) |
| PA-739/759 (antisense) | CUUGCCCUCAAUGUAGCCGdTdT (SEQ ID NO: 82) |
| PA-2087/2107 (G) (sense) | GCAAUUGAGGAGUGCCUGAdTdT (SEQ ID NO: 83) |
| PA-2087/2107 (G) (antisense) | UCAGGCACUCCUCAAUUGCdTdT (SEQ ID NO: 84) |
| PA-2110/2130 (sense) | UGAUCCCUGGGUUUUGCUUdTdT (SEQ ID NO: 85) |
| PA-2110/2130 (antisense) | AAGCAAAACCCAGGGAUCAdTdT (SEQ ID NO: 86) |
| PA-2131/2151 (sense) | UGCUUCUUGGUUCAACUCCdTdT (SEQ ID NO: 87) |
| PA-2131/2151 (antisense) | GGAGUUGAACCAAGAAGCAdTdT (SEQ ID NO: 88) |
| NP-231/251 (sense) | UAGAGAGAAUGGUGCUCUCdTdT (SEQ ID NO: 89) |
| NP-231/251 (antisense) | GAGAGCACCAUUCUCUCUAdTdT (SEQ ID NO: 90) |
| NP-390/410 (sense) | UAAGGCGAAUCUGGCGCCAdTdT (SEQ ID NO: 91) |
| NP-390/410 (antisense) | UGGCGCCAGAUUCGCCUUAdTdT (SEQ ID NO: 92) |
| NP-1496/1516 (sense) | GGAUCUUAUUUCUUCGGAGdTdT (SEQ ID NO: 93) |
| NP-1496/1516 (antisense) | CUCCGAAGAAAUAAGAUCCdTdT (SEQ ID NO: 94) |
| NP-1496/1516a (sense) | GGAUCUUAUUUCUUCGGAGAdTdT (SEQ ID NO: 188) |
| NP-1496/1516a (antisense) | UCUCCGAAGAAAUAAGAUCCdTdT (SEQ ID NO: 189) |
| M-37/57 (sense) | CCGAGGUCGAAACGUACGUdTdT (SEQ ID NO: 95) |
| M-37/57 (antisense) | ACGUACGUUUCGACCUCGGdTdT (SEQ ID NO: 96) |
| M-480/500 (sense) | CAGAUUGCUGACUCCCAGCdTdT (SEQ ID NO: 97) |
| M-480/500 (antisense) | GCUGGGAGUCAGCAAUCUGdTdT (SEQ ID NO: 98) |
| M-598/618 (sense) | UGGCUGGAUCGAGUGAGCAdTdT (SEQ ID NO: 99) |
| M-598/618 (antisense) | UGCUCACUCGAUCCAGCCAdTdT (SEQ ID NO: 100) |
| M-934/954 (sense) | GAAUAUCGAAAGGAACAGCdTdT (SEQ ID NO: 101) |
| M-934/954 (antisense) | GCUGUUCCUUUCGAUAUUCdTdT (SEQ ID NO: 102) |
| NS-128/148 (sense) | CGGCUUCGCCGAGAUCAGAdAdT (SEQ ID NO: 103) |
| NS-128/148 (antisense) | UCUGAUCUCGGCGAAGCCGdAdT (SEQ ID NO: 104) |
| NS-562/582 (R) (sense) | GUCCUCCGAUGAGGACUCCdTdT (SEQ ID NO: 105) |
| NS-562/582 (R) (antisense) | GGAGUCCUCAUCGGAGGACdTdT (SEQ ID NO: 106) |
| NS-589/609 (sense) | UGAUAACACAGUUCGAGUCdTdT (SEQ ID NO: 107) |
| NS-589/609 (antisense) | GACUCGAACUGUGUUAUCAdTdT (SEQ ID NO: 108) |

[0340] All siRNAs were synthesized by Dharmacon Research (Lafayette, Colo.) using 2′ACE protection chemistry. The siRNA strands were deprotected according to the manufacturer's instructions, mixed in equimolar ratios and annealed by heating to 95° C. and slowly reducing the temperature by 1° C. every 30 s until 35° C. and 1° C. every min until 5° C.

[0341] siRNA electroporation. Log-phase cultures of MDCK cells were trypsinized, washed and resuspended in serum-free RPMI 1640 at 2×10⁷ cells per ml. 0.5 ml of cells were placed into a 0.4 cm cuvette and were electroporated using a Gene Pulser apparatus (Bio-Rad) at 400 V, 975 μF with 2.5 nmol siRNAs. Electroporation efficiencies were approximately 30-40% of viable cells. Electroporated cells were divided into 3 wells of a 6-well plate in DMEM medium containing 10% FCS and incubated at 37° C., 5% CO₂.

[0342] Viral infection. Six to eighth following electroporation, the serum-containing medium was washed away and 100 μl of PR8 or WSN virus at the appropriate multiplicity of infection was inoculated into the wells, each of which contained approximately 10⁶ cells. Cells were infected with either 1,000 PFU (one virus per 1,000 cells; MOI=0.001) or 10,000 PFU (one virus per 100 cells; MOI=0.01) of virus. After 1 h incubation at room temperature, 2 ml of infection medium with 4 μg/ml of trypsin was added to each well and the cells were incubated at 37° C., 5% CO₂. At indicated times, supernatants were harvested from infected cultures and the titer of virus was determined by hemagglutination of chicken erythrocytes (50 μl, 0.5%, Charles River laboratories, Mass.).

[0343] Measurement of Viral Titer. Supernatants were harvested at 24, 36, 48, and 60 hours after infection. Viral titer was measured using a standard hemagglutinin assay as described in Knipe D M, Howley, P M, Fundamental Virology, 4th edition, p. 34-35. The hemagglutination assay was done in V-bottomed 96-well plates. Serial 2-fold dilutions of each sample were incubated for 1 h on ice with an equal volume of a 0.5% suspension of chicken erythrocytes (Charles River Laboratories). Wells containing an adherent, homogeneous layer of erythrocytes were scored as positive. For plaque assays, serial 10-fold dilutions of each sample were titered for virus as described in Fundamental Virology, 4^{th} edition, p. 32, as well known in the art.

[0344] Results

[0345] To investigate the feasibility of using siRNA to suppress influenza virus replication, various influenza virus A RNAs were targeted. Specifically, the MDCK cell line, which is readily infected and widely used to study influenza virus, was utilized. Each siRNA was individually introduced into populations of MDCK cells by electroporation. siRNA targeted to GFP (sense: 5′-GGCUACGUCCAGGAGCGCAUU-3′0 (SEQ ID NO: 110); antisense: 5′-UGCGCUCCUGGACGUAGCCUU-3′ (SEQ ID NO: 111)) was used as control. This siRNA is referred to as GFP-949. In subsequent experiments (described in examples below) the UU overhang at the 3′ end of both strands was replaced by dTdT with no effect on results. A mock electroporation was also performed as a control. Eight hours after electroporation cells were infected with either influenza A virus PR8 or WSN at an MOI of either 0.1 or 0.01 and were analyzed for virus production at various time points (24, 36, 48, 60 hours) thereafter using a standard hemagglutination assay. GFP expression was assayed by flow cytometry using standard methods.

[0346] FIGS. 11A and 11B compare results of experiments in which the ability of individual siRNAs to inhibit replication of influenza virus A strain A/Puerto Rico/8/34 (H1N1) (FIG. 11A) or influenza virus A strain A/WSN/33 (H1N1) (FIG. 11B) was determined by measuring HA titer. Thus a high HA titer indicates a lack of inhibition while a low HA titer indicates effective inhibition. MDCK cells were infected at an MOI of 0.01. For these experiments one siRNA that targets the PB1 segment (PB1-2257/2277), one siRNA that targets the PB2 segment (PB2-2240/2260), one siRNA that targets the PA segment (PA-2087/2107 (G)), and three different siRNAs that target the NP genome and transcript (NP-231/251, NP-390/410, and NP-1496/1516) were tested. Note that the legends on FIGS. 11A and 11B list only the 5′ nucleotide of the siRNAs.

[0347] Symbols in FIGS. 11A and 11B are as follows: Filled squares represents control cells that did not receive siRNA. Open squares represents cells that received the GFP control siRNA. Filled circles represent cells that received siRNA PB 1-2257/2277. Open circles represent cells that received siRNA PB2-2240/2260. Open triangles represent cells that received siRNA PA-2087/2107 (G). The X symbol represents cells that received siRNA NP-231/251. The + symbol represents cells that received siRNA NP-390/410. Closed triangles represent cells that received siRNA NP-1496/1516. Note that in the graphs certain symbols are sometimes superimposed. For example, in FIG. 11B the open and closed triangles are superimposed. Tables 3 and 4, which list the numerical values for each point, may be consulted for clarification.

[0348] As shown in FIGS. 11A and 11B (Tables 3 and 4), in the absence of siRNA (mock TF) or the presence of control (GFP) siRNA, the titer of virus increased over time, reaching a peak at approximately 48-60 hours after infection. In contrast, at 60 hours the viral titer was significantly lower in the presence of any of the siRNAs. For example, in strain WSN the HA titer (which reflects the level of virus) was approximately half as great in the presence of siRNAs PB2-2240 or NP-231 than in the controls. In particular, the level of virus was below the detection limit (10,000 PFU/ml) in the presence of siRNA NP-1496 in both strains. This represents a decrease by a factor of more than 60-fold in the PR8 strain and more than 120-fold in the WSN strain. The level of virus was also below the detection limit (10,000 PFU/ml) in the presence of siRNA PA-2087(G) in strain WSN and was extremely low in strain PR8. Suppression of virus production by siRNA was evident even from the earliest time point measured. Effective suppression, including suppression of virus production to undetectable levels (as determined by HA titer) has been observed at time points as great as 72 hours post-infection.

[0349] Table 5 summarizes results of siRNA inhibition assays at 60 hours in MDCK cells expressed in terms of fold inhibition. Thus a low value indicates lack of inhibition while a high value indicates effective inhibition. The location of siRNAs within a viral gene is indicated by the number that follows the name of the gene. As elsewhere herein, the number represents the starting nucleotide of the siRNA in the gene. For example, NP-1496 indicates an siRNA specific for NP, the first nucleotide starting at nucleotide 1496 of the NP sequence. Values shown (fold-inhibition) are calculated by dividing hemagglutinin units from mock transfection by hemagglutinin units from transfection with the indicated siRNA; a value of 1 means no inhibition.

[0350] A total of twenty siRNAs, targeted to 6 segments of the influenza virus genome (PB2, PB1, PA, NP, M and NS), were tested in the MDCK cell line system (Table 5). About 15% of the siRNA (PB1-2257, PA-2087G and NP-1496) tested displayed a strong effect, inhibiting viral production by more than 100 fold in most cases at MOI=0.001 and by 16 to 64 fold at MOI=0.01, regardless of whether PR8 or WSN virus was used. In particular, when siRNA NP-1496 or PA-2087 was used, inhibition was so pronounced that culture supernatants lacked detectable hemagglutinin activity. These potent siRNAs target 3 different viral gene segments: PB1 and PA, which are involved in the RNA transcriptase complex, and NP which is a single-stranded RNA binding nucleoprotein. Consistent with findings in other systems, the sequences targeted by these siRNAs are all positioned relatively close to the 3-prime end of the coding region (FIG. 13).

[0351] Approximately 40% of the siRNAs significantly inhibited virus production, but the extent of inhibition varied depending on certain parameters. Approximately 15% of siRNAs potently inhibited virus production regardless of whether PR8 or WSN virus was used. However, in the case of certain siRNAs, the extent of inhibition varied somewhat depending on whether PR8 or WSN was used. Some siRNAs significantly inhibited virus production only at early time points (24 to 36 hours after infection) or only at lower dosage of infection (MOI=0.001), such as PB2-2240, PB1-129, NP-231 and M-37. These siRNAs target different viral gene segments, and the corresponding sequences are positioned either close to 3-prime end or 5-prime end of the coding region (FIG. 13). Tables 5A and 5B present results of the assays. Approximately 45% of the siRNAs had no discernible effect on the virus titer, indicating that they were not effective in interfering with influenza virus production in MDCK cells. In particular, none of the four siRNAs which target the NS gene segment showed any inhibitory effect.

[0352] To estimate virus titers more precisely, plaque assays with culture supernatants were performed (at 60 hrs) from culture supernatants obtained from virus-infected cells that had undergone mock transfection or transfection with NP-1496. Approximately 6×10⁵ pfu/ml was detected in mock supernatant, whereas no plaques were detected in undiluted NP-1496 supernatant (FIG. 11C). As the detection limit of the plaque assay is about 20 pfu (plaque forming unit)/ml, the inhibition of virus production by NP-1496 is at least about 30,000 fold. Even at an MOI of 0.1, NP-1496 inhibited virus production about 200-fold.

[0353] To determine the potency of siRNA, a graded amount of NP-1496 was transfected into MDCK cells followed by infection with PR8 virus. Virus titers in the culture supernatants were measured by hemagglutinin assay. As the amount of siRNA decreased, virus titer increased in the culture supernatants as shown in FIG. 11D. However, even when as little as 25 pmol of siRNA was used for transfection, approximately 4-fold inhibition of virus production was detected as compared to mock transfection, indicating the potency of NP-1496 siRNA in inhibiting influenza virus production.

[0354] For therapy, it is desirable for siRNA to be able to effectively inhibit an existing virus infection. In a typical influenza virus infection, new virions are released beginning at about 4 hours after infection. To determine whether siRNA could reduce or eliminate infection by newly released virus in the face of an existing infection, MDCK cells were infected with PR8 virus for 2 hours and then transfected with NP-1496 siRNA. As shown in FIG. 11E, virus titer increased steadily over time following mock transfection, whereas virus titer increased only slightly in NP-1496 transfected cells. Thus administration of siRNA after virus infection is effective.

[0355] Together, these results show that (i) certain siRNAs can potently inhibit influenza virus production; (ii) influenza virus production can be inhibited by siRNAs specific for different viral genes, including those encoding NP, PA, and PB1 proteins; and (iii) siRNA inhibition occurs in cells that were infected previously in addition to cells infected simultaneously with or following administration of siRNAs.

TABLE 3
Inhibition of Virus Strain A/Puerto Rico/8/34 (H1N1)
Production by siRNAs
siRNA

| | | | PB1- | PB2- | PA- | | | NP- |
|---|---|---|---|---|---|---|---|---|
| | Mock | GFP | 2257 | 2040 | 2087(G) | NP-231 | NP-390 | 1496 |
| 24 hr | 8 | 8 | 1 | 4 | 1 | 1 | 4 | 1 |
| 36 hr | 16 | 8 | 4 | 8 | 1 | 4 | 8 | 1 |
| 48 hr | 32 | 32 | 4 | 8 | 2 | 4 | 8 | 1 |
| 60 hr | 64 | 64 | 8 | 8 | 4 | 8 | 32 | 1 |

[0356] TABLE 4
Inhibition of Virus Strain A/WSN/33 (H1N1) Production by siRNAs
siRNA

| | | | PB1- | PB2- | PA- | | | NP- |
|---|---|---|---|---|---|---|---|---|
| | Mock | GFP | 2257 | 2040 | 2087(G) | NP-231 | NP-390 | 1496 |
| 24 hr | 32 | 32 | 1 | 8 | 1 | 8 | 16 | 1 |
| 36 hr | 64 | 128 | 16 | 32 | 1 | 64 | 64 | 1 |
| 48 hr | 128 | 128 | 16 | 64 | 1 | 64 | 64 | 1 |
| 60 hr | 128 | 128 | 32 | 64 | 1 | 64 | 128 | 1 |

[0357] TABLE 5A
Effects of 20 siRNAs on influenza virus production in MDCK cells

| | | Infecting virus (MOI) | | | | |
|---|---|---|---|---|---|---|
| | | PR8 | PR8 | PR8 | WSN | WSN |
| | siRNA | (0.001) | (0.01) | (0.1) | (0.001) | (0.01) |
| Exp. 1 | GFP-949 | 2 | 1 | | | |
| | PB2-2210 | 16 | 8 | | | |
| | PB2-2240 | 128 | 16 | | | |
| | PB1-6 | 4 | 4 | | | |
| | PB1-129 | 128 | 16 | | | |
| | PB1-2257 | 256 | 64 | | | |
| Exp. 2 | GFP-949 | 2 | 1 | | | |
| | PA-44 | 2 | 1 | | | |
| | PA-739 | 4 | 2 | | | |
| | PA-2087 | 128 | 16 | | | |
| | PA-2110 | 8 | 4 | | | |
| | PA-2131 | 4 | 2 | | | |
| Exp. 3 | NP-231 | 16 | 4 | | 4 | |
| | NP-390 | 4 | 2 | | 2 | |
| | NP-1496 | 16 | 64 | | 128 | |
| | M-37 | 2 | 2 | | 128 | |
| Exp. 4 | M-37 | | 2 | 1 | 128 | |
| | M-480 | | 2 | 1 | 4 | |
| | M-598 | | 2 | 1 | 128 | |
| | M-934 | | 1 | 1 | 4 | |
| | NS-128 | | 2 | 1 | 2 | |
| | NS-562 | | 1 | 1 | 1 | |
| | NS-589 | | 1 | 1 | 1 | |
| | NP-1496 | | 64 | 16 | 128 | |
| Exp. 5 | GFP-949 | | 1 | | | 1 |
| | PB2-2240 | | 8 | | | 2 |
| | PB1-2257 | | 8 | | | 4 |
| | PA-2087 | | 16 | | | 128 |
| | NP-1496 | | 64 | | | 128 |
| | NP-231 | | 8 | | | 2 |

[0358] TABLE 5B
Effects of siRNAs on influenza virus production in MDCK cells

| 10\hat{ }3 pfu/well (MOI .001) | | | | | 10{circumflex over ( 4 pfu/well (MOI .01) | | | | |
|---|---|---|---|---|---|---|---|---|---|
| | # WELLS | | HA UNITS | | | # WELLS | | HA UNITS | |
| | 24 HR | 48 HR | 24 HR | 48 HR | | 24 HR | 48 HR | 24 HR | 48 HR |
| Exp. 1 | | | | | | | | | |
| NT | 2 | 5 | 4 | 32 | NT | 6 | 7 | 64 | 128 |
| NP 1496 | 0 | 0 | 1 | 1 | NP 1496 | 3 | 5 | 8 | 32 |
| M 3 | 1 | 5 | 2 | 32 | M 3 | 5 | 7 | 32 | 128 |
| M 150 | 1 | 3 | 2 | 8 | M 150 | 6 | 7 | 64 | 128 |
| M 172 | 0 | 2 | 1 | 4 | M 172 | 6 | 7 | 64 | 128 |
| PB2 4 | 0 | 3 | 1 | 8 | PB2 4 | 5 | 7 | 32 | 128 |
| PB2 68 | 1 | 5 | 2 | 32 | PB2 68 | 6 | 7 | 64 | 128 |
| PB2 115 | 2 | 5 | 4 | 32 | PB2 115 | 6 | 7 | 64 | 128 |
| Exp. 2 | | | | | | | | | |
| NT | 1 | 4 | 2 | 16 | NT | 7 | >8 | 128 | >256 |
| NP 1496 | 0 | 1 | 1 | 2 | NP 1496 | 0 | 1 | 1 | 2 |
| NS 5 | 0 | 3 | 1 | 8 | NS 5 | 6 | >8 | 64 | >256 |
| NS 9 | 1 | 4 | 2 | 16 | NS 9 | 6 | >8 | 64 | >256 |
| M 211 | 1 | 4 | 2 | 16 | M 211 | 7 | >8 | 128 | >256 |
| M 232 | 0 | 2 | 1 | 4 | M 232 | 5 | >8 | 32 | >256 |
| PB2 167 | 0 | 2 | 1 | 4 | PB2 167 | 5 | 7 | 32 | 128 |
| PB2 473 | 1 | 4 | 2 | 16 | PB2 473 | 7 | >8 | 128 | >256 |
| Exp. 3 | | | | | | | | | |
| NT | 1 | 5 | 2 | 32 | NT | 4 | 7 | 16 | 128 |
| NP 1496 | 0 | 1 | 1 | 2 | NP 1496 | 0 | 3 | 1 | 8 |
| NS 543 | 1 | 5 | 2 | 32 | NS 543 | 2 | 6 | 4 | 64 |
| NS 623 | 1 | 5 | 2 | 32 | NS 623 | 4 | 7 | 16 | 128 |
| M 723 | 1 | 5 | 2 | 32 | M 723 | 2 | 7 | 4 | 128 |
| Exp. 4 | | | | | | | | | |
| NT | 3 | 6 | 8 | 64 | NT | >8 | 9 | >256 | 512 |
| NP 1496 | 0 | 1 | 1 | 2 | NP 1496 | 1 | 4 | 2 | 16 |
| NP 1501 | 0 | 4 | 1 | 16 | NP 1501 | 6 | 8 | 64 | 256 |
| NS 642 | 3 | 5 | 8 | 32 | NS 642 | 8 | 9 | 256 | 512 |
| NS 831 | 3 | 5 | 8 | 32 | NS 831 | 8 | 9 | 256 | 512 |
| PB1 1618 | 3 | 6 | 8 | 64 | PB1 1618 | 7 | 9 | 128 | 512 |
| PB2 12 | 3 | 5 | 8 | 32 | PB2 12 | 7 | 9 | 128 | 512 |
| M 232 | 2 | 5 | 4 | 32 | M 232 | 6 | 8 | 64 | 256 |
| Exp. 5 | | | | | | | | | |
| NT | 1 | 4 | 2 | 16 | NT | 5 | 7 | 32 | 128 |
| NP 1496 | 0 | 1 | 1 | 2 | NP 1496 | 0 | 1 | 1 | 2 |
| NP 14 | 1 | 4 | 2 | 16 | NP 14 | 5 | 7 | 32 | 128 |
| NP 1488 | 0 | 1 | 1 | 2 | NP 1488 | 0 | 3 | 1 | 8 |
| PB2 2283 | 0 | 2 | 1 | 4 | PB2 2283 | 4 | 5 | 16 | 32 |
| PA 2188 | 1 | 4 | 2 | 16 | PA 2188 | 4 | 6 | 16 | 64 |
| Exp. 6 | | | | | | | | | |
| NT | 2 | 4 | 4 | 16 | NT | 7 | 8 | 128 | 256 |
| NP 1496 | 0 | 0 | 1 | 1 | NP 1496 | 1 | 1 | 2 | 2 |
| PB2 956 | 2 | 4 | 4 | 16 | PB2 956 | 7 | 8 | 128 | 256 |
| M 13 | 2 | 4 | 4 | 16 | M 13 | 7 | 8 | 128 | 256 |
| M 255 | 1 | 2 | 2 | 4 | M 255 | 5 | 6 | 32 | 64 |
| M 645 | 1 | 2 | 2 | 4 | M 645 | 5 | 6 | 32 | 64 |
| M 808 | 1 | 3 | 2 | 8 | M 808 | 6 | 7 | 64 | 128 |
| M 832 | 1 | 1 | 2 | 2 | M 832 | 5 | 6 | 32 | 64 |
| M 986 | 2 | 3 | 4 | 8 | M 986 | 7 | 7 | 128 | 128 |
| NP 1488 | 0 | 0 | 1 | 1 | NP 1488 | 1 | 4 | 2 | 16 |
| Exp. 7 | | | | | | | | | |
| NT | 2 | 5 | 4 | 32 | NT | 6 | 8 | 64 | 256 |
| NP 1496 | 0 | 0 | 1 | 1 | NP 1496 | 2 | 3 | 4 | 8 |
| NP 1501 | 0 | 4 | 1 | 16 | NP 1501 | 4 | 6 | 16 | 64 |
| PB2 4 | 0 | 2 | 1 | 4 | PB2 4 | 5 | 6 | 32 | 64 |
| PB2 2283 | 0 | 3 | 1 | 8 | PB2 2283 | 4 | 6 | 16 | 64 |
| M 172 | 2 | 5 | 4 | 32 | M 172 | 5 | 7 | 32 | 128 |
| M 255 | 0 | 2 | 1 | 4 | M 255 | 4 | 6 | 16 | 64 |
| M 645 | 0 | 3 | 1 | 8 | M 645 | 4 | 6 | 16 | 64 |
| M 832 | 0 | 1 | 1 | 2 | M 832 | 4 | 6 | 16 | 64 |

### Example 3

### siRNAs that Target Viral RNA Polymerase or Nucleoprotein Inhibit Influenza A Virus Production in Chicken Embryos

[0359] Materials and Methods

[0360] SiRNA-oligofectamine complex formation and chicken embryo inoculation. SiRNAs were prepared as described above. Chicken eggs were maintained under standard conditions. 30 μl of Oligofectamine (product number: 12252011 from Life Technologies, now Invitrogen) was mixed with 30 μl of Opti-MEM I (Gibco) and incubated at RT for 5 min. 2.5 nmol (10 μl) of siRNA was mixed with 30 μl of Opti-MEM I and added into diluted oligofectamine. The siRNA and oligofectamine was incubated at RT for 30 min. 10-day old chicken eggs were inoculated with siRNA-oligofectamine complex together with 100 μl of PR8 virus (5000 pfu/ml). The eggs were incubated at 37° C. for indicated time and allantoic fluid was harvested. Viral titer in allantoic fluid was tested by HA assay as described above.

[0361] Results

[0362] To confirm the results in MDCK cells, the ability of siRNA to inhibit influenza virus production in fertilized chicken eggs was also assayed. Because electroporation cannot be used on eggs, Oligofectamine, a lipid-based agent that has been shown to facilitate intracellular uptake of DNA oligonucleotides as well as siRNAs in vitro was used (25). Briefly, PR8 virus alone (500 pfu) or virus plus siRNA-oligofectamine complex was injected into the allantoic cavity of 10-day old chicken eggs as shown schematically in FIG. 14A. Allantoic fluids were collected 17 hours later for measuring virus titers by hemagglutinin assay. As shown in FIG. 14B, when virus was injected alone (in the presence of Oligofectamine), high virus titers were readily detected. Co-injection of GFP-949 did not significantly affect the virus titer. (No significant reduction in virus titer was observed when Oligofectamine was omitted.)

[0363] The injection of siRNAs specific for influenza virus showed results consistent with those observed in MDCK cells: The same siRNAs (NP-1496, PA2087 and PB 1-2257) that inhibited influenza virus production in MDCK cells also inhibited virus production in chicken eggs, whereas the siRNAs (NP-231, M-37 and PB 1-129) that were less effective in MDCK cells were ineffective in fertilized chicken eggs. Thus, siRNAs are also effective in interfering with influenza virus production in fertilized chicken eggs.

### Example 4

### SiRNA Inhibits Influenza Virus Production at the mRNA Level

[0364] Materials and Methods

[0365] SiRNA preparation was performed as described above.

[0366] RNA extraction, reverse transcription and real time PCR. 1×10⁷ MDCK cells were electroporated with 2.5 nmol of NP-1496 or mock electroporated (no siRNA). Eight hours later, influenza A PR8 virus was inoculated into the cells at MOI=0.1. At times 1, 2, and 3-hour post-infection, the supernatant was removed, and the cells were lysed with Trizol reagent (Gibco). RNA was purified according to the manufacturer's instructions. Reverse transcription (RT) was carried out at 37° C. for 1 hr, using 200 ng of total RNA, specific primers (see below), and Omniscript Reverse transcriptase kit (Qiagen) in a 20-μl reaction mixture according to the manufacturer's instructions. Primers specific for either mRNA, NP vRNA, NP cRNA, NS vRNA, or NS cRNA were as follows:

mRNA, dT₁₈ =

(SEQ ID NO: 112)

5′-TTTTTTTTTTTTTTTTTT-3′
NP vRNA, NP-367:

(SEQ ID NO: 113)

5′-CTCGTCGCTTATGACAAAGAAG-3′.
NP cRNA, NP-1565R:

(SEQ ID NO: 114)

5′-ATATCGTCTCGTATTAGTAGAAACAAGGGTATTTTT-3′.
NS vRNA, NS-527:

(SEQ ID NO: 115)

5′-CAGGACATACTGATGAGGATG-3′.
NS cRNA, NS-890R:

(SEQ ID NO: 116)

5′-ATATCGTCTCGTATTAGTAGAAACAAGGGTGTTTT-3′.

[0367] 1 μl of RT reaction mixture (i.e., the sample obtained by performing reverse transcription) and sequence-specific primers were used for real-time PCR using SYBR Green PCR master mix (AB Applied Biosystems) including SYBR Green I double-stranded DNA binding dye. PCRs were cycled in an ABI PRISM 7000 sequence detection system (AB applied Biosystem) and analyzed with ABI PRISM 7000 SDS software (AB Applied Biosystems). The PCR reaction was carried out at 50° C., 2 min, 95° C., 10 min, then 95° C., 15 sec and 60° C., 1 min for 50 cycles. Cycle times were analyzed at a reading of 0.2 fluorescence units. All reactions were done in duplicate. Cycle times that varied by more than 1.0 between the duplicates were discarded. The duplicate cycle times were then averaged and the cycle time of β-actin was subtracted from them for a normalized value.

[0368] PCR primers were as follows.

| | |
|---|---|
| For NP RNAs: | |
| NP-367: | |
| 5′-CTCGTCGCTTATGACAAAGAAG-3′. | (SEQ ID NO: 117) |
| NP-460R: | |
| 5′-AGATCATCATGTGAGTCAGAC-3′. | (SEQ ID NO: 118) |
| For NS RNAs: | |
| NS-527: | |
| 5′-CAGGACATACTGATGAGGATG-3′. | (SEQ ID NO: 119) |
| NS-617R: | |
| 5′-GTTTCAGAGACTCGAACTGTG-3′. | (SEQ ID NO: 120) |

[0369] Results

[0370] As described above, during replication of influenza virus, vRNA is transcribed to produce cRNA, which serves as a template for more vRNA synthesis, and mRNA, which serves as a template for protein synthesis (1). Although RNAi is known to target the degradation of mRNA in a sequence-specific manner (16-18), there is a possibility that vRNA and cRNA are also targets for siRNA since vRNA of influenza A virus is sensitive to nuclease (1). To investigate the effect of siRNA on the degradation of various RNA species, reverse transcription using sequence-specific primers followed by real time PCR was used to quantify the levels of vRNA, cRNA and mRNA. FIG. 16 shows the relationship between influenza virus vRNA, mRNA, and cRNA. As shown in FIGS. 16A and 16B, cRNA is the exact complement of vRNA, but mRNA contains a cap structure at the 5′ end plus the additional 10 to 13 nucleotides derived from host cell mRNA, and mRNA contains a polyA sequence at the 3′ end, beginning at a site complementary to a site 15-22 nucleotides downstream from the 5′ end of the vRNA segment. Thus compared to vRNA and cRNA, mRNA lacks 15 to 22 nucleotides at the 3′ end. To distinguish among the three viral RNA species, primers specific for vRNA, cRNA and mRNA were used in the first reverse transcription reaction (FIG. 16B). For mRNA, poly dT 18 was used as primer. For cRNA, a primer complementary to the 3′ end of the RNA that is missing from mRNA was used. For vRNA, the primer can be almost anywhere along the RNA as long as it is complementary to vRNA and not too close to the 5′ end. The resulting cDNA transcribed from only one of the RNAs was amplified by real time PCR.

[0371] Following influenza virus infection, new virions are starting to be packaged and released by about 4 hrs. To determine the effect of siRNA on the first wave of mRNA and cRNA transcription, RNA was isolated early after infection. Briefly, NP-1496 was electroporated into MDCK cells. A mock electroporation (no siRNA) was also performed). Six to eight hours later, cells were infected with PR8 virus at MOI=0.1. The cells were then lysed at 1, 2 and 3 hours post-infection and RNA was isolated. The levels of mRNA, vRNA and cRNA were assayed by reverse transcription using primers for each RNA species, followed by real time PCR.

[0372] FIG. 17 shows amounts of viral NP and NS RNA species at various times following infection with virus, in cells that were mock transfected or transfected with siRNA NP-1496 approximately 6-8 hours prior to infection. As shown in FIG. 17, 1 hour after infection, there was no significant difference in the amount of NP mRNA between samples with or without NP siRNA transfection. As early as 2 hours post-infection, NP mRNA increased by 38 fold in the mock transfection group, whereas the levels of NP mRNA did not increase (or even slightly decreased) in cells transfected with siRNA. Three hours post-infection, mRNA transcript levels continued to increase in the mock transfection whereas a continuous decrease in the amount of NP mRNA was observed in the cells that received siRNA treatment. NP vRNA and cRNA displayed a similar pattern except that the increase in the amount of vRNA and cRNA in the mock transfection was significant only at 3 hrs post-infection. While not wishing to be bound by any theory, this is probably due to the life cycle of the influenza virus, in which an initial round of mRNA transcription occurs before cRNA and further vRNA synthesis.

[0373] These results indicate that, consistent with the results of measuring intact, live virus by hemagglutinin assay or plaque assay, the amounts of all NP RNA species were also significantly reduced by the treatment with NP siRNA. Although it is known that siRNA mainly mediates degradation of mRNA, the data from this experiment does not exclude the possibility of siRNA-mediated degradation of NP cRNA and vRNA although the results described below suggest that reduction in NP protein levels as a result of reduction in NP mRNA results in decreased stability of NP cRNA and/or vRNA.

### Example 5

### Identification of the Target of RNA Interference

[0374] Materials and Methods

[0375] SiRNA preparation of unmodified siRNAs was performed as described above. Modified RNA oligonucleotides, in which the 2′-hydroxyl group was substituted with a 2′-O-methyl group at every nucleotide residue of either the sense or antisense strand, or both, were also synthesized by Dharmacon. Modified oligonucleotides were deprotected and annealed to the complementary strand as described for unmodified oligonucleotides. siRNA duplexes were analyzed for completion of duplex formation by gel electrophoresis.

[0376] Cell culture, transfection with siRNAs, and infection with virus. These were performed essentially as described above. Briefly, for the experiment involving modified NP-1496 siRNA, MDCK cells were first transfected with NP-1496 siRNAs (2.5 nmol) formed from wild type (wt) and modified (m) strands and infected 8 hours later with PR8 virus at a MOI of 0.1. Virus titers in the culture supernatants were assayed 24 hours after infection. For the experiment involving M-37 siRNA, MDCK cells were transfected with M-37 siRNAs (2.5 nmol), infected with PR8 virus at an MOI of 0.01, and harvested for RNA isolation 1, 2, and 3 hours after infection. See Table 2 for M-37 sense and antisense sequences.

[0377] RNA extraction, reverse transcription and real time PCR were performed essentially as described above. Primers specific for either mRNA, M-specific vRNA, and M-specific cRNA, used for reverse transcription, were as follows:

mRNA, dT₁₈ =

(SEQ ID NO: 112)

5′-TTTTTTTTTTTTTTTTTT-3′
M vRNA:

(SEQ ID NO: 161)

5′-CGCTCAGACATGAGAACAGAATGG-3′
M cRNA:

(SEQ ID NO: 162)

5′-ATATCGTCTCGTATTAGTAGAAACAAGGTAGTTTTT-3′

[0378] PCR primers for M RNAs were as follows:

(SEQ ID NO: 163)

M forward: 5′-CGCTCAGACATGAGAACAGAATGG-3′

(SEQ ID NO: 164)

M reverse: 5′-TAACTAGCCTGACTAGCAACCTC-3′

[0379] Results

[0380] To investigate the possibility that siRNA might interfere with vRNA and/or cRNA in addition to mRNA, NP-1496 siRNAs in which either the sense (S or +) or antisense (AS or −) strand was modified were synthesized. The modification, which substitutes a 2′-O-methyl group for the 2′-hydroxyl group in every nucleotide residue, does not affect base-pairing for duplex formation, but the modified RNA strand no longer supports RNA interference. In other words, an siRNA in which the sense strand is modified but the antisense strand is wild type (mS:wtAS) will support degradation of RNAs having a sequence complementary to the antisense strand but not a sequence complementary to the sense strand. Conversely, an siRNA in which the sense strand is wild type but the antisense strand is modified (wtS:mAS) will support degradation of RNAs having a sequence complementary to the sense strand but will not support degradation of RNAs having a sequence complementary to the sense strand.

[0381] MDCK cells were either mock transfected or transfected with NP-i1496 siRNAs in which either the sense strand (mS:wtAS) or the antisense strand (wtS:mAS), was modified while the other strand was wild type. Cells were also transfected with NP-1496 siRNA in which both strands were modified (mS:mAS). Cells were then infected with PR8 virus, and virus titer in supernatants was measured. As shown in FIG. 18A, high virus titers were detected in cultures subjected to mock transfection. As expected, very low virus titers were detected in cultures transfected with wild type siRNA (wtS:wtAS), but high virus titers were detected in cultures transfected with siRNA in which both strands were modified (mS:mAS). Virus titers were high in cultures transfected with siRNA in which the antisense strand was modified (wtAS:mAS), whereas the virus titers were low in cultures transfected with siRNA in which the sense strand only was modified (mS:wtAS). While not wishing to be bound by any theory, the inventors suggest that the requirement for a wild type antisense (−) strand of siRNA duplex to inhibit influenza virus production suggests that the target of RNA interference is either mRNA (+) or cRNA (+) or both.

[0382] To further distinguish these possibilities, the effect of siRNA on the accumulation of corresponding mRNA, vRNA, and cRNA was examined. To follow transcription in a cohort of simultaneously infected cells, siRNA-transfected MDCK cells were harvested for RNA isolation 1, 2, and 3 hours after infection (before the release and re-infection of new virions). The viral mRNA, vRNA, and cRNA were first independently converted to cDNA by reverse transcription using specific primers. Then, the level of each cDNA was quantified by real time PCR. As shown in FIG. 18B, when M-specific siRNA M-37 was used, little M-specific mRNA was detected one or two hours after infection. Three hours after infection, M-specific mRNA was readily detected in the absence of M-37. In cells transfected with M-37, the level of M-specific mRNA was reduced by approximately 50%. In contrast, the levels of M-specific vRNA and cRNA were not inhibited by the presence of M-37. While not wishing to be bound by any theory, these results indicate that viral mRNA is probably the target of siRNA-mediated interference.

### Example 6

### Effects of Certain siRNAs on Viral RNA Accumulation

[0383] Materials and Methods

[0384] SiRNA preparation was performed as described above.

[0385] RNA extraction, reverse transcription and real time PCR were performed as described in Example 3. Primers specific for either mRNA, NP vRNA, NP cRNA, NS vRNA, NS cRNA, M vRNA, or M cRNA were as described in Examples 4 and 5. Primers specific for PB1 vRNA, PB1 cRNA, PB2 vRNA, PB2 cRNA, PA vRNA, or PA cRNA, used for reverse transcription, were as follows:

(SEQ ID NO: 165)

PB1 vRNA: 5′-GTGCAGAAATCAGCCCGAATGGTTC-3′

(SEQ ID NO: 166)

PB1 cRNA: 5′-ATATCGTCTCGTATTAGTAGAAACAAGGCATTT-3′

(SEQ ID NO: 167)

PB2 vRNA: 5′-GCGAAAGGAGAGAAGGCTAATGTG-3′

(SEQ ID NO: 168)

PB2 cRNA: 5′-ATATGGTCTCGTATTAGTAGAAACAAGGTCGTTT-3′

(SEQ ID NO: 169)

PA vRNA: 5′-GCTTCTTATCGTTCAGGCTCTTAGG-3′

(SEQ ID NO: 170)

PA cRNA: 5′-ATATCGTCTCGTATTAGTAGAAACAAGGTACTT-3′

[0386] PCR primers for PB1, PB2, and PA RNAs were as follows:

(SEQ ID NO: 171)

PB1 forward: 5′-CGGATTGATGCACGGATTGATTTC-3′

(SEQ ID NO: 172)

PB1 reverse: 5′-GACGTCTGAGCTCTTCAATGGTGGAAC-3′

(SEQ ID NO: 173)

PB2 forward: 5′-GCGAAAGGAGAGAAGGCTAATGTG-3′

(SEQ ID NO: 174)

PB2 reverse: 5′-AATCGCTGTCTGGCTGTCAGTAAG-3′

(SEQ ID NO: 175)

PA forward: 5′-GCTTCTTATCGTTCAGGCTCTTAGG-3′

(SEQ ID NO: 176)

PA reverse: 5′-CCGAGAAGCATTAAGCAAAACCCAG-3′

[0387] Results

[0388] To determine whether NP-1496 targets the degradation of the NP gene segment specifically or whether the levels of viral RNAs other than NP are also affected, primers specific for NS were used for RT and real time PCR to measure the amount of different NS RNA species (mRNA, vRNA, cRNA) as described above (Example 4). As shown in FIG. 19, the changes in NS mRNA, vRNA and cRNA showed the same pattern as that observed for NP RNAs. At 3 hours post-infection, a significant increase in all NS RNA species could be seen in mock transfected cells, whereas no significant changes in NS RNA levels were seen in the cells that received NP-1496 siRNA. This result indicates that the transcription and replication of different viral RNAs are coordinately regulated, at least with respect to NP RNAs. By coordinately regulated is meant that levels of one transcript affect levels of another transcript, either directly or indirectly. No particular mechanism is implied. When NP transcripts are degraded by siRNA treatment the levels of other viral RNAs are also reduced.

[0389] To further explore the effect of NP siRNAs on other viral RNAs, accumulation of mRNA, vRNA, and cRNA of all viral genes was measured in cells that had been treated with NP-1496. As shown in FIG. 19A (top panel), NP-specific mRNA was low one or two hours after infection. Three hours after infection, NP mRNA was readily detected in the absence of NP-1496, whereas in the presence of NP-1496, the level of NP mRNA remained at the background level, indicating that siRNA inhibited the accumulation of specific mRNA. As shown in FIG. 19A (middle and bottom panels) levels of NP-specific and NS-specific vRNA and cRNA were greatly inhibited by the presence of NP-1496. These results confirm the results described in Example 4. In addition, in the NP-1496-treated cells, the accumulation of mRNA, vRNA, and cRNA of the M, NS, PB1, PB2, and PA genes was also inhibited (FIGS. 19B, 19C, and 19H). Furthermore, the broad inhibitory effect was also observed for PA-2087. The top, middle, and bottom panels on the left side in FIGS. 19E, 19F, and 19G display the same results as presented in FIGS. 19A, 19B, and 19C, showing the inhibition of viral mRNA transcription and of viral vRNA and cRNA replication by NP-1496 siRNA. The top, middle, and bottom panels on the right side in FIGS. 19E, 19F, and 19G present results of the same experiment performed with PA-2087 siRNA at the same concentration. As shown in FIG. 19E, right upper, middle, and lower panels respectively, at three hours after infection PA, M, and NS mRNA were readily detected in the absence of PA-2087, whereas the presence of PA-2087 inhibited transcription of PA, M, and NS mRNA. As shown in FIG. 19F, right upper, middle, and lower panels respectively, at three hours after infection PA, M, and NS vRNA were readily detected in the absence of PA-2087, whereas the presence of PA-2087 inhibited accumulation of PA, M, and NS vRNA. As shown in FIG. 19G, right upper, middle, and lower panels respectively, at three hours after infection PA, M, and NS cRNA were readily detected in the absence of PA-2087, whereas the presence of PA-2087 inhibited accumulation of PA, M, and NS cRNA. In addition, FIG. 19H shows that NP-specific siRNA inhibits the accumulation of PB1—(top panel), PB2—(middle panel) and PA—(lower panel) specific mRNA.

[0390] While not wishing to be bound by any theory, the inventors suggest that the broad effect of NP siRNA is probably a result of the importance of NP in binding and stabilizing vRNA and cRNA, and not because NP-specific siRNA targets RNA degradation non-specifically. The NP gene segment in influenza virus encodes a single-stranded RNA-binding nucleoprotein, which can bind to both vRNA and cRNA (see FIG. 15). During the viral life cycle, NP mRNA is first transcribed and translated. The primary function of the NP protein is to encapsidate the virus genome for the purpose of RNA transcription, replication and packaging. In the absence of NP protein, the full-length synthesis of both vRNA and cRNA is strongly impaired. When NP siRNA induces the degradation of NP RNA, NP protein synthesis is impaired and the resulting lack of sufficient NP protein subsequently affects the replication of other viral gene segments. In this way, NP siRNA could potently inhibit virus production at a very early stage.

[0391] The number of NP protein molecules in infected cells has been hypothesized to regulate the levels of mRNA synthesis versus genome RNA (vRNA and cRNA) replication (1). Using a temperature-sensitive mutation in the NP protein, previous studies have shown that cRNA, but not mRNA, synthesis was temperature sensitive both in vitro and in vivo (70, 71). NP protein was shown to be required for elongation and antitermination of the nascent cRNA and vRNA transcripts (71, 72). The results presented above show that NP-specific siRNA inhibited the accumulation of all viral RNAs in infected cells. While not wishing to be bound by any theory, it appears probable that in the presence of NP-specific siRNA, the newly transcribed NP mRNA is degraded, resulting in the inhibition of NP protein synthesis following virus infection. Without newly synthesized NP, further viral transcription and replication, and therefore new virion production is inhibited.

[0392] Similarly, in the presence of PA-specific, the newly transcribed PA mRNA is degraded, resulting in the inhibition of PA protein synthesis. Despite the presence of 30-60 copies of RNA transcriptase per influenza virion (1), without newly synthesized RNA transcriptase, further viral transcription and replication are likely inhibited. Similar results were obtained using siRNA specific for PB1. In contrast, the matrix (M) protein is not required until the late phase of virus infection (1). Thus, M-specific siRNA inhibits the accumulation of M-specific mRNA but not vRNA, cRNA, or other viral RNAs. Taken together, these findings demonstrate a critical requirement for newly synthesized nucleoprotein and polymerase proteins in influenza viral RNA transcription and replication. Both mRNA- and virus-specific mechanisms by which NP-, PA-, and PB1-specific siRNAs interfere with mRNA accumulation and other viral RNA transcription suggest that these siRNAs may be especially potent inhibitors of influenza virus infection.

### Example 7

### Broad Inhibition of Influenza Virus RNA Accumulation by Certain siRNAs is Not Due to the Interferon Response or to Virus-induced RNA Degradation

[0393] Materials and Methods

[0394] Measurement of RNA levels. RNA levels were measured using PCR under standard conditions. The following PCR primers were used for measurement of γ-actin RNA.

(SEQ ID NO: 177)

γ-actin forward: 5′-TCTGTCAGGGTTGGAAAGTC-3′

(SEQ ID NO: 178)

γ-actin reverse: 5′-AAATGCAAACCGCTTCCAAC-3′

[0395] Culture of Vero cells and measurements of phosphorylated PKR were performed according to standard techniques described in the references cited below.

[0396] Results

[0397] One possible cause for the broad inhibition of viral RNA accumulation described in Example 6 is an interferon response of the infected cells in the presence of siRNA (23, 65, 66). Thus, the above experiments were repeated in Vero cells in which the entire IFN locus, including all α, β, and ω genes, are deleted (67, 68) (Q.G. and J.C. unpublished data). Just as in MDCK cells, the accumulation of NP-, M-, and NS-specific mRNAs were all inhibited by NP-1496 (FIG. 19D). In addition, the effect of siRNA on the levels of transcripts from cellular genes, including β-actin, γ-actin, and GAPDH, was assayed using PCR. No significant difference in the transcript levels was detected in the absence or presence of siRNA (FIG. 18C bottom panel, showing lack of effect of M-37 siRNA on γ-actin mRNA, and data not shown), indicating that the inhibitory effect of siRNA is specific for viral RNAs. These results suggest that the broad inhibition of viral RNA accumulation by certain siRNAs is not a result of a cellular interferon response.

[0398] Following influenza virus infection, the presence of dsRNA also activates a cellular pathway that targets RNA for degradation (23). To examine the effect of siRNA on the activation of this pathway, we assayed the levels of phosphorylated protein kinase R (PKR), the most critical component of the pathway (23). Transfection of MDCK cells with NP-1496 in the absence of virus infection did not affect the levels of activated PKR (data not shown). Infection by influenza virus resulted in an increased level of phosphorylated PKR, consistent with previous studies (65, 66, 69). However, the increase was the same in the presence or absence of NP-1496 (data not shown). Thus, the broad inhibition of viral RNA accumulation is not a result of enhanced virus-induced degradation in the presence of siRNA.

### Example 8

### Systematic Identification of siRNAs with Superior Ability to Inhibit Influenza Virus Production Either Alone or in Combination

[0399] A high throughput screen (Example 18) was conducted to identify siRNAs with superior ability to inhibit influenza virus production. The siRNAs were tested individually in cell culture, and a number were further tested in mice. Certain combinations were also tested and demonstrated an additive effect. Systematic testing of additional combinations is performed to identify combinations with synergistic (i.e., greater than additive) effects. The siRNAs and other RNAi-inducing entitities comprising the same antisense strands are further tested against additional influenza virus strains, including major human and avian pathogens.

### Example 9

### Evaluation of Non-Viral Delivery Agents that Facilitate Cellular Uptake of siRNA

[0400] A variety of non-viral delivery agents were tested for their ability to enhance cellular uptake of siRNA. Subsequent examples provide data showing positive results (e.g., inhibition of influenza virus production) with a number of the polymers in both cell culture and in animals. Additional delivery agents are tested using similar approaches.

### Example 10

### Testing of Compositions Containing RNAi-Inducing Agents in Mice

[0401] Dry particles comprising an RNAi-inducing agent targeted to an influenza virus transcript are prepared as described (58). In this procedure, water-soluble excipients (i.e. lactose, albumin, etc.) and therapeutics were dissolved in distilled water. The solution was fed to a Niro Atomizer Portable Spray Dryer (Niro, Inc., Colombus, Md.) to produce the dry powders, which have a mean geometric diameters ranged between 3 and 15 μm and tap density. between 0.04 and 0.6 g/cm³. The dry powders are administered to the respiratory system of mice by inhalation or intratracheal administration. Inhalational delivery of a dry powder aerosol is accomplished by forced ventilation on anesthetized mice. For intratracheal administration, a solution containing therapeutics is injected via a tube into the lungs of anesthetized mice (54). In other experiments, for delivery of liquids, liquid aerosols are produced by a nebulizer into a sealed plastic cage, where the mice are placed (52). Insufflators such as those available from Penn Century (URLwww.penncentury.com), e.g., Model IA-IC may be used for pulmonary delivery of dry powders to small animals.

### Example 11

### Inhibition of Influenza Virus Infection by siRNAs Transcribed from Templates Provided by DNA Vectors or Lentiviruses

[0402] As an alternative to the approaches described above, the use of DNA vectors from which siRNA precursors can be transcribed and processed into effective siRNAs was explored as described in Examples 13 and 14. FIGS. 20A-20C show vectors that were used for previous studies (27, 59), results of which are shown in FIG. 20D and further described in U.S. Ser. No. 10/674,159. FIGS. 21A-21C show additional constructs that can be used to test the efficacy of hairpin precursors that include precursors for multiple different siRNAs.

### Example 12

### Inhibition of Influenza Virus Production in Mice by siRNAs

[0403] This example describes experiments showing that administration of siRNAs targeted to influenza virus NP or PA transcripts inhibit production of influenza virus in mice when administered either prior to or following infection with influenza virus. The inhibition is dose-dependent and shows additive effects when two siRNAs each targeted to a transcript expressed from a different influenza virus gene were administered together.

[0404] Materials and Methods

[0405] SiRNA preparation. This was performed as described above.

[0406] SiRNA delivery. siRNAs (30 or 60 μg of GFP-949, NP-1496, or PA-2087) were incubated with jetPEI™ for oligonucleotides cationic polymer transfection reagent, N/P ratio=5 (Qbiogene, Inc., Carlsbad, Calif.; Cat. No. GDSP20130; N/r refers to the number of nitrogens per nucleotide phosphate in the jetPEI/siRNA mixture) or with poly-L-lysine (MW (vis) 52,000; MW (LALLS) 41,800, Sigma Cat. No. P2636) for 20 min at room temperature in 5% glucose. The mixture was injected into mice intravenously, into the retro-orbital vein, 200 μl per mouse, 4 mice per group. 200 μl 5% glucose was injected into control (no treatment) mice. The mice were anesthetized with 2.5% Avertin before siRNA injection or intranasal infection.

[0407] Viral infection. B6 mice (maintained under standard laboratory conditions) were intranasally infected with PR8 virus by dropping virus-containing buffer into the mouse's nose with a pipette, 30 ul (12,000 pfu) per mouse.

[0408] Determination of viral titer. Mice were sacrificed at various times following infection, and lungs were harvested. Lungs were homogenized, and the homogenate was frozen and thawed twice to release virus. PR8 virus present in infected lungs was titered by infection of MDCK cells. Flat-bottom 96-well plates were seeded with 3×10⁴ MDCK cells per well, and 24 hrs later the serum-containing medium was removed. 25 μl of lung homogenate, either undiluted or diluted from 1×10⁻¹ to 1×10⁻⁷, was inoculated into triplicate wells. After 1 h incubation, 175 μl of infection medium with 4 μg/ml of trypsin was added to each well. Following a 48 h incubation at 37° C., the presence or absence of virus was determined by hemagglutination of chicken RBC by supernatant from infected cells. The hemagglutination assay was carried out in V-bottom 96-well plates. Serial 2-fold dilutions of supernatant were mixed with an equal volume of a 0.5% suspension (vol/vol) of chicken erythrocytes (Charles River Laboratories) and incubated on ice for 1 h. Wells containing an adherent, homogeneous layer of erythrocytes were scored as positive. The virus titers were determined by interpolation of the dilution end point that infected 50% of wells by the method of Reed and Muench (TCID₅₀), thus a lower TCID₅₀ reflects a lower virus titer. The data from any two groups were compared by Student t test, which was used throughout the experiments described herein to evaluate significance.

[0409] Results

[0410] FIG. 22A shows results of an experiment demonstrating that siRNA targeted to viral NP transcripts inhibits influenza virus production in mice when administered prior to infection. 30 or 60 μg of GFP-949 or NP-1496 siRNAs were incubated with jetPEI and injected intravenously into mice as described above in Materials and Methods. Three hours later mice were intranasally infected with PR8 virus, 12000 pfu per mouse. Lungs were harvested 24 hours after infection. As shown in FIG. 22A, the average log₁₀ TCID₅₀ of the lung homogenate for mice that received no siRNA treatment (NT; filled squares) or received an siRNA targeted to GFP (GFP 60 μg; open squares) was 4.2. In mice that were pretreated with 30 μg siRNA targeted to NP (NP 30 μg; open circles) and jetPEI, the average log₁₀ TCID₅₀ of the lung homogenate was 3.9. In mice that were pretreated with 60 μg siRNA targeted to NP (NP 60 μg; filled circles) and jetPEI, the average log₁₀ TCID₅₀ of the lung homogenate was 3.2. The difference in virus titer in the lung homogenate between the group that received no treatment and the group that received 60 μg NP siRNA was significant with P=0.0002. Data for individual mice are presented in Table 6A (NT=no treatment).

[0411] FIG. 22B shows results of another experiment demonstrating that siRNA targeted to viral NP transcripts inhibits influenza virus production in mice when administered intravenously prior to infection in a composition containing the cationic polymer PLL. 30 or 60 μg of GFP-949 or NP-1496 siRNAs were incubated with PLL and injected intravenously into mice as described above in Materials and Methods. Three hours later mice were intranasally infected with PR8 virus, 12000 pfu per mouse. Lungs were harvested 24 hours after infection. As shown in FIG. 22B, the average log₁₀ TCID₅₀ of the lung homogenate for mice that received no siRNA treatment (NT; filled squares) or received an siRNA targeted to GFP (GFP 60 μg; open squares) was 4.1. In mice that were pretreated with 60 μg siRNA targeted to NP (NP 60 μg; filled circles) and PLL, the average log₁₀ TCID₅₀ of the lung homogenate was 3.0. The difference in virus titer in the lung homogenate between the group that received 60 μg GFP and the group that received 60 μg NP siRNA was significant with P=0.001. Data for individual mice are presented in Table 6A (NT=no treatment). These data indicate that siRNA targeted to the influenza NP transcript reduced the virus titer in the lung when administered prior to virus infection. They also indicate that a mixtures of an siRNA with a cationic polymer effectively inhibits influenza virus in the lung when administered by intravenous injection, not requiring techniques such as hydrodynamic transfection.

TABLE 6A
Inhibition of influenza virus production in mice by siRNA with cationic
polymers

| | |
|---|---|
| Treatment | log₁₀TCID50 |

| | | | | |
|---|---|---|---|---|
| NT (jetPEI experiment) | 4.3 | 4.3 | 4.0 | 4.0 |
| GFP (60 μg) + jetPEI | 4.3 | 4.3 | 4.3 | 4.0 |
| NP (30 μg) + jetPEI | 4.0 | 4.0 | 3.7 | 3.7 |
| NP (60 μg) + jetPEI | 3.3 | 3.3 | 3.0 | 3.0 |
| NT (PLL experiment) | 4.0 | 4.3 | 4.0 | 4.0 |
| GFP (60 μg) + PLL | 4.3 | 4.0 | 4.0 | (not done) |
| NP (60 μg) + PLL | 3.3 | 3.0 | 3.0 | 2.7 |

[0412] FIG. 22C shows results of a third experiment demonstrating that siRNA targeted to viral NP transcripts inhibits influenza virus production in mice when administered prior to infection and demonstrates that the presence of a cationic polymer significantly increases the inhibitory efficacy of siRNA. 60 μg of GFP-949 or NP-1496 siRNAs were incubated with phosphate buffered saline (PBS) or jetPEI and injected intravenously into mice as described above in Materials and Methods. Three hours later mice were intranasally infected with PR8 virus, 12000 pfu per mouse. Lungs were harvested 24 hours after infection. As shown in FIG. 22C, the average log₁₀ TCID₅₀ of the lung homogenate for mice that received no siRNA treatment (NT; open squares) was 4.1, while the average log₁₀ TCID₅₀ of the lung homogenate for mice that received an siRNA targeted to GFP in PBS (GFP PBS; open triangles) was 4.4. In mice that were pretreated with 60 μg siRNA targeted to NP in PBS (NP PBS; closed triangles) the average log₁₀ TCID₅₀ of the lung homogenate was 4.2, showing only a modest increase in efficacy relative to no treatment or treatment with an siRNA targeted to GFP. In mice that were pretreated with 60 μg siRNA targeted to GFP in jetPEI (GFP PEI; open circles), the average log₁₀ TCID₅₀ of the lung homogenate was 4.2. However, in mice that received 60 μg siRNA targeted to NP in jetPEI (NP PEI; closed circles), the average log₁₀ TCID₅₀ of the lung homogenate was 3.2. The difference in virus titer in the lung homogenate between the group that received GFP siRNA in PBS and the group that received NP siRNA in PBS was significant with P=0.04, while the difference in virus titer in the lung homogenate between the group that received GFP siRNA with jetPEI and the group that received NP siRNA with jetPEI was highly significant with P=0.003. Data for individual mice are presented in Table 6B (NT=no treatment).

TABLE 6B
Inhibition of influenza virus production in mice by siRNA showing
increased efficacy with cationic polymer

| | |
|---|---|
| Treatment | log₁₀TCID50 |

| | | | | |
|---|---|---|---|---|
| NT | 4.3 | 4.3 | 4.0 | 3.7 |
| GFP (60 μg) + PBS | 4.3 | 4.3 | 4.7 | 4.3 |
| NP (60 μg) + PBS | 3.7 | 4.3 | 4.0 | 4.0 |
| GFP (60 μg) + jetPEI | 4.3 | 4.3 | 4.0 | 3.0 |
| NT (60 μg) + jetPEI | 3.3 | 3.0 | 3.7 | 3.0 |

[0413] Additional experiments were performed to assess the ability of siRNA to inhibit influenza virus production at various times after infection, when administered at various time points prior to or following infection.

[0414] siRNA was administered as described above except that 120 ug siRNA was administered 12 hours before virus infection. Table 6C shows the results expresesed as log₁₀ TCID₅₀. The P value comparing NP-treated with control group was 0.049

TABLE 6C

| | Mouse 1 | Mouse 2 | Mouse 3 | Mouse 4 |
|---|---|---|---|---|
| NT | 4.3 | 4 | 4 | 4 |
| GFP-949 | 4.3 | 4 | 4 | 4 |
| NP-1496 | 4 | 3.7 | 3.7 | 3.3 |

[0415] In another experiment, siRNA (60 ug) was administered 3 hours before infection. 1500 pfu of PR8 virus was administered intranasally. The infected lung was harvested 48 h after infection. Table 6D shows the results expressed as log₁₀ TCID₅₀. The P value comparing NP-treated with control group was 0.03.

TABLE 6D

| | Mouse 1 | Mouse 2 | Mouse 3 | Mouse 4 |
|---|---|---|---|---|
| NT | 4 | 4 | 4 | 4 |
| GFP-949 | 4.3 | 4 | 4 | 3.7 |
| NP-1496 | 3 | 3.7 | 3.7 | 3.3 |

[0416] In another experiment, siRNA (120 ug) was administered 24 hours after PR8 (1500 pfu) infection. 52 hours post-infection, the lung was harvested and virus titer was measured. Table 6D shows the results expressed as log₁₀ TCID₅₀. The P value comparing NP-treated with control group was 0.03.

TABLE 6E

| | Mouse 1 | Mouse 2 | Mouse 3 | Mouse 4 |
|---|---|---|---|---|
| GFP-949 | 2.3 | 2.7 | 2 | 2.7 |
| NP-1496 | 2 | 2 | 1.7 | 2 |

[0417] Other polymers were also shown to be effective siRNA delivery agents. FIG. 22D is a plot showing that siRNA targeted to NP (NP-1496) inhibits influenza virus production in mice when administered intravenously together with a poly(beta amino ester) (J28). FIG. 22E is a plot showing that siRNA targeted to NP (NP-1496) inhibits influenza virus production in mice when administered intraperitoneally together with a poly(beta amino ester) (J28 or C32) while a control RNA (GFP) has no significant effect. The experiments were performed essentially as described above except that the ratio of polymer to siRNA was a weight/weight ratio (for instance, 60:1 w/w). Polymers and siRNA were mixed and administered to mice either intravenously or intraperitoneally 3 hours prior to intranasal infection with 12,000 pfu of PR8 virus. Lungs were harvested 24 hours later and HA assays were performed. The amine and bis(acrylate ester) monomers present in J28 and C32 are described and depicted in U.S. Ser. No. 10/446,444. The polymers were a kind gift of Dr. Robert Langer.

[0418] FIG. 23 shows results of an experiment demonstrating that siRNAs targeted to different influenza virus transcripts exhibit an additive effect. Sixty μg of NP-1496 siRNA, 60 μg PA-2087 siRNA, or 60 μg NP-1496 siRNA+60 μg PA-2087 siRNA were incubated with jetPEI and injected intravenously into mice as described above in Materials and Methods. Three hours later mice were intranasally infected with PR8 virus, 12000 pfu per mouse. Lungs were harvested 24 hours after infection. As shown in FIG. 23, the average log₁₀TCID₅₀ of the lung homogenate for mice that received no siRNA treatment (NT; filled squares) was 4.2. In mice that received 60 μg siRNA targeted to NP (NP 60 μg; open circles), the average log₁₀ TCID₅₀ of the lung homogenate was 3.2. In mice that received 60 μg siRNA targeted to PA (PA 60 μg; open triangles), the average log₁₀ TCID₅₀ of the lung homogenate was 3.4. In mice that received 60 μg siRNA targeted to NP+60 μg siRNA targeted to PA (NP+PA; filled circles), the average log₁₀ TCID₅₀ of the lung homogenate was 2.4. The differences in virus titer in the lung homogenate between the group that received no treatment and the groups that received 60 μg NP siRNA, 60 μg PA siRNA, or 60 μg NP siRNA+60 μg PA siRNA were significant with P=0.003, 0.01, and 0.0001, respectively. The differences in lung homogenate between the groups that received 60 μg NP siRNA or 60 μg NP siRNA and the group that received 60 μg NP siRNA+60 μg PA siRNA were significant with P=0.01. Data for individual mice are presented in Table 7 (NT=no treatment). These data indicate that pretreatment with siRNA targeted to the influenza NP or PA transcript reduced the virus titer in the lungs of mice subsequently infected with influenza virus. The data further indicate that a combination of siRNA targeted to different viral transcripts exhibit an additive effect, suggesting that therapy with a combination of siRNAs targeted to different transcripts may allow a reduction in dose of each siRNA, relative to the amount of a single siRNA that would be needed to achieve equal efficacy.

TABLE 7
Additive effect of siRNA against influenza virus in mice

| | |
|---|---|
| Treatment | log₁₀TCID50 |

| | | | | |
|---|---|---|---|---|
| NT | 4.3 | 4.3 | 4.0 | 4.0 |
| NP (60 μg) | 3.7 | 3.3 | 3.0 | 3.0 |
| PA (60 μg) | 3.7 | 3.7 | 3.0 | 3.0 |
| NP + PA (60 μg | 2.7 | 2.7 | 2.3 | 2.0 |
| each) | | | | |

[0419] FIG. 24 shows results of an experiment demonstrating that siRNA targeted to viral NP transcripts inhibits influenza virus production in mice when administered following infection. Mice were intranasally infected with PR8 virus, 500 pfu. Sixty μg of GFP-949 siRNA, 60 μg PA-2087 siRNA, 60 μg NP-1496 siRNA, or 60 μg NP siRNA+60 μg PA siRNA were incubated with jetPEI and injected intravenously into mice 5 hours later as described above in Materials and Methods. Lungs were harvested 28 hours after administration of siRNA. As shown in FIG. 24, the average log₁₀ TCID₅₀ of the lung homogenate for mice that received no siRNA treatment (NT; filled squares) or received the GFP-specific siRNA GFP-949 (GFP; open squares) was 3.0. In mice that received 60 μg siRNA targeted to PA (PA 60 μg; open triangles), the average log₁₀ TCID₅₀ of the lung homogenate was 2.2. In mice that received 60 μg siRNA targeted to NP (NP 60 μg; open circles), the average log₁₀ TCID₅₀ of the lung homogenate was 2.2. In mice that received 60 μg NP siRNA+60 μg PA siRNA (PA+NP; filled circles), the average log₁₀ TCID₅₀ of the lung homogenate was 1.8. The differences in virus titer in the lung homogenate between the group that received no treatment and the groups that received 60 μg PA, NP siRNA, or 60 μg NP siRNA+60 μg PA siRNA were significant with P=0.09, 0.02, and 0.003, respectively. The difference in virus titer in the lung homogenate between the group that received NP siRNA and PA+NP siRNAs had a P value of 0.2. Data for individual mice are presented in Table 8 (NT=no treatment). These data indicate that siRNA targeted to the influenza NP and/or PA transcripts reduced the virus titer in the lung when administered following virus infection.

TABLE 8
Inhibition of influenza virus production in infected mice by siRNA

| | |
|---|---|
| Treatment | log₁₀TCID50 |

| | | | | |
|---|---|---|---|---|
| NT | 3.0 | 3.0 | 3.0 | 3.0 |
| GFP (60 μg) | 3.0 | 3.0 | 3.0 | 2.7 |
| PA (60 μg) | 2.7 | 2.7 | 2.3 | 1.3 |
| NP (60 μg) | 2.7 | 2.3 | 2.3 | 1.7 |
| NP + PA (60 μg | 2.3 | 2.0 | 1.7 | 1.3 |
| each) | | | | |

### Example 13

### Inhibition of Influenza Virus Production in Cells by Administration of a Lentivirus that Provides a Template for Production of shRNA

[0420] Materials and Methods

[0421] Cell culture. Vero cells were seeded in 24-well plates at 4×10⁵ cells per well in 1 ml of DMEM-10% FCS and were incubated at 37° C. under 5% CO₂.

[0422] Production of lentivirus that provides a template for shRNA production. An oligonucleotide that serves as a template for synthesis of an NP-1496a shRNA (see FIG. 25A) was cloned between the U6 promoter and termination sequence of lentiviral vector pLL3.7 (Rubinson, D., et al, Nature Genetics, Vol. 33, pp. 401-406, 2003), as depicted schematically in FIG. 25A. The oligonucleotide was inserted between the HpaI and XhoI restriction sites within the multiple cloning site of pLL3.7. This lentiviral vector also expresses EGFP for easy monitoring of transfected/infected cells. Lentivirus was produced by co-transfecting the DNA vector comprising a template for production of NP-1496a shRNA and packaging vectors into 293T cells. Forty-eighth later, culture supernatant containing lentivirus was collected, spun at 2000 rpm for 7 min at 4° C. and then filtered through a 0.45 um filter. Vero cells were seeded at 1×10⁵ per well in 24-well plates. After overnight culture, culture supernatants containing that contained the insert (either 0.25 ml or 1.0 ml) were added to wells in the presence of 8 ug/ml polybrene. The plates were then centrifuged at 2500 rpm, room temperature for 1 h and returned to culture. Twenty-four h after infection, the resulting Vero cell lines (Vero-NP-0.25, and Vero-NP-1.0) were analyzed for GFP expression by flow cytometry along with parental (non-infected) Vero cells. It is noted that NP-1496a differs from NP-1496 due to the inadvertent inclusion of an additional nucleotide (A) at the 3′ end of the sense portion and a complementary nucleotide (U) at the 5′ end of the antisense portion, resulting in a duplex portion that is 20 nt in length rather than 19 as in NP-1496. (See Table 2). According to other embodiments of the invention NP-1496 sequences rather than NP-1496a sequences are used. In addition, the loop portion of NP-1496a shRNA differs from that of NP-1496 shRNA shown in FIG. 21.

[0423] Influenza virus infection and determination of viral titer. Control Vero cells and Vero cells infected with lentivirus containing the insert (Vero-NP-0.25 and Vero-NP-1.0) were infected with PR8 virus at MOI of 0.04, 0.2 and 1. Influenza virus titers in the supernatants were determined by HA assay 48 hrs after infection as described in Example 12.

[0424] Results

[0425] Lentivirus containing templates for production of NP-1496a shRNA were tested for ability to inhibit influenza virus production in Vero cells. The NP-1496a shRNA includes two complementary regions capable of forming a stem-loop structure containing a double-stranded portion that has the same sequence as the NP-1496a siRNA described above. As shown in FIG. 25B, incubation of lentivirus-containing supernatants with Vero cells overnight resulted In expression of EGFP, indicating infection of Vero cells by lentivirus. The shaded curve represents mean fluorescence intensity in control cells (uninfected). When 1 ml of supernatant was used, almost all cells became EGFP positive and the mean fluorescence intensity was high (1818) (Vero-NP-1.0). When 0.25 ml of supernatant was used, most cells (˜95%) were EGFP positive and the mean fluorescence intensity was lower (503) (Vero-NP-0.25).

[0426] Parental Vero cells and lentivirus-infected Vero cells were then infected with influenza virus at MOI of 0.04, 0.2, and 0.1, and virus titers were assayed 48 hrs after influenza virus infection. With increasing MOI, the virus titers increased in the supernatants of parental Vero cell cultures (FIG. 25C). In contrast, the virus titers remained very low in supernatants of Vero-NP-1.0 cell cultures, indicating influenza virus production was inhibited in these cells. Similarly, influenza virus production in Vero-NP-0.25 cell cultures was also partially inhibited. The viral titers are presented in Table 9. These results suggest that NP-1496 shRNA expressed from lentivirus vectors can be processed into siRNA to inhibit influenza virus production in Vero cells. The extent of inhibition appears to be proportional to the extent of virus infection per cell (indicated by EGFP level).

TABLE 9
Inhibition of influenza virus production by siRNA expressed in cells in
tissue culture

| Cell Line | Viral Titer | | |
|---|---|---|---|
| Vero | 16 | 64 | 128 |
| Vero-NP-0.25 | 8 | 32 | 64 |
| Vero-NP-1.0 | 1 | 4 | 8 |

### Example 14

### Inhibition of Influenza Production in Mice by Intranasal Administration of a DNA Vector from which siRNA Precursors are Transcribed

[0427] Materials and Methods

[0428] Construction of plasmids that serves as template for shRNA. Construction of a plasmid from which NP-1496a shRNA is expressed is described in Example 13. Oligonucleotides that serve as templates for synthesis of PB 1-2257 shRNA or RSV-specific shRNA were cloned between the U6 promoter and termination sequence of lentiviral vector pLL3.7 as described in Example 13 and depicted schematically in FIG. 25A for NP-1496a shRNA. The sequences of the oligonucleotides were as follows:

NP-1496a sense:

(SEQ ID NO: 179)

5′- TGGATCTTATTTCTTCGGAGATTCAAGAGATCTCCGAAGAAATAAG
ATCCTTTTTTC-3′
NP-1496a antisense:

(SEQ ID NO: 180)

5′-TCGAGAAAAAAGGATCTTATTTCTTCGGAGATCTCTTGAATCTCCGA
AGAAATAAGATCCA-3′
PB1-2257 sense:

(SEQ ID NO: 181)

5′-TGATCTGTTCCACCATTGAATTCAAGAGATTCAATGGTGGAACAGAT
CTTTTTTC-3′
PB1-2257 antisense:

(SEQ ID NO: 182)

5′-TCGAGAAAAAAGATCTGTTCCACCATTGAATCTCTTGAATTCAATGG
TGGAACAGATCA-3′
RSV sense:

(SEQ ID NO: 183)

5′-TGCGATAATATAACTGCAAGATTCAAGAGATCTTGCAGTTATATTAT
CGTTTTTTC-3′
RSV antisense:

(SEQ ID NO: 184)

5′-TCGAGAAAAAACGATAATATAACTGCAAGATCTCTTGAATCTTGCAG
TTATATTATCGCA-3′

[0429] The RSV shRNA expressed from the vector comprising the above oligonucleotide is processed in vivo to generate an siRNA having sense and antisense strands with the following sequences:

| | |
|---|---|
| Sense: | |
| 5′-CGATAATATAACTGCAAGA-3′ | (SEQ ID NO: 185) |
| Antisense: | |
| 5′-TCTTGCAGTTATATTATCG-3′ | (SEQ ID NO: 186) |

[0430] A PA-specific hairpin may be similarly constructed using the following oligonucleotides:

PA-2087 sense:

(SEQ ID NO: 187)

5′-TGCAATTGAGGAGTGCCTGATTCAAGAGATCAGGCACTCCTCAATTG
CTTTTTTC-3′
PA-2087 antisense:

(SEQ ID NO: 270)

5′-TCGAGAAAAAAGCAATTGAGGAGTGCCTGATCTCTTGAATCAGGCAC
TCCTCAATTGCA-3′

[0431] Viral infection and determination of viral titer. These were performed as described Example 12.

[0432] DNA Delivery. Plasmid DNAs capable of serving as templates for expression of NP-1496a shRNA, PB1-2257 shRNA, or RSV-specific shRNA (60 μg each) were individually mixed with 40 μl Infasurf® (ONY, Inc., Amherst N.Y.) and 20 μl of 5% glucose and were administered intranasally to groups of mice, 4 mice each group, as described above. A mixture of 40 μl Infasurf and 20 μl of 5% glucose was administered to mice in the no treatment (NT) group. The mice were intranasally infected with PR8 virus, 12000 pfu per mouse, 13 hours later, as described above. Lungs were harvested and viral titer determined 24 hours after infection.

[0433] Results

[0434] The ability of shRNAs expressed from DNA vectors to inhibit influenza virus infection in mice was tested. For these experiments, plasmid DNA was mixed with Infasurf, a natural surfactant extract from calf lung similar to vehicles previously shown to promote gene transfer in the lung (74). The DNA/Infasurf mixtures were instilled into mice by dropping the mixture into the nose using a pipette. Mice were infected with PR8 virus, 12000 pfu per mouse, 13 hours later. Twenty-four hrs after influenza virus infection, lungs were harvested and virus titers were measured by MDCK/hemagglutinin assay.

[0435] As shown in FIG. 26, virus titers were high in mice that were not given any plasmid DNA or were given a DNA vector expressing a respiratory syncytial virus (RSV)-specific shRNA. Lower virus titers were observed when mice were given plasmid DNA that expresses either NP-1496a shRNA or PB1-2257 shRNA. The virus titers were more significantly decreased when mice were given both influenza-specific plasmid DNAs together, one expressing NP-1496a shRNA and the other expressing PB1-2257 shRNA. The average log₁₀ TCID₅₀ of the lung homogenate for mice that received no treatment (NT; open squares) or received a plasmid encoding an RSV-specific shRNA (RSV; filled squares) was 4.0 or 4.1, respectively. In mice that received plasmid capable of serving as a template for NP-1496a shRNA (NP; open circles), the average log₁₀ TCID₅₀ of the lung homogenate was 3.4. In mice that received plasmid capable of serving as a template for PB1-2257 shRNA (PB; open triangles), the average log₁₀ TCID₅₀ of the lung homogenate was 3.8. In mice that received plasmids capable of serving as templates for NP and PB shRNAs (NP+PB1; filled circles), the average log₁₀ TCID₅₀ of the lung homogenate was 3.2. The differences in virus titer in the lung homogenate between the group that received no treatment or RSV-specific shRNA plasmid and the groups that received NP shRNA plasmid, PB1 shRNA plasmid, or NP and PB1 shRNA plasmids had P values of 0.049, 0.124, and 0.004 respectively. Data for individual mice are presented in Table 10 (NT=no treatment). These results show that shRNA expressed from DNA vectors can be processed into siRNA to inhibit influenza virus production in mice and demonstrate that Infasurf is a suitable vehicle for the delivery of plasmids from which shRNA can be expressed. In particular, these data indicate that shRNA targeted to the influenza NP and/or PB1 transcripts reduced the virus titer in the lung when administered following virus infection.

TABLE 10
Inhibition of influenza virus production by shRNA expressed in mice

| | |
|---|---|
| Treatment | log₁₀TCID50 |

| | | | | |
|---|---|---|---|---|
| NT | 4.3 | 4.0 | 4.0 | 4.3 |
| RSV (60 μg) | 4.3 | 4.0 | 4.0 | 4.0 |
| NP (60 μg) | 4.0 | 3.7 | 3.0 | 3.0 |
| PB1 (60 μg) | 4.0 | 4.0 | 3.7 | 3.3 |
| NP + PB1 (60 μg | 3.7 | 3.3 | 3.0 | 3.0 |
| each) | | | | |

### Example 15

### Cationic Polymers Promote Cellular Uptake of siRNA

[0436] Materials and Methods

[0437] Reagents. Poly-L-lysines of two different average molecular weights [poly-L-lysine (MW (vis) 52,000; MW (LALLS) 41,800, Cat. No. P2636) and poly-L-lysine (MW (vis) 9,400; MW (LALLS) 8,400, Cat. No. P2636], poly-L-arginine (MW 15,000-70,000 Cat. No. P7762) and 3-(4,5-dimethylthiazol-2-yl)-2,5-diphenyl tetrazolium bromide (MTT) were purchased from Sigma. For purposes of description molecular weights obtained using the LALLS method will be assumed, but it is to be understood that molecular weights are approximate since the polymers display some heterogeneity in size.

[0438] Gel retardation assay. siRNA-polymer complexes were formed by mixing 10 μl of siRNA (10 pmol in 10 mM Hepes buffer, pH 7.2) with 10 μl of polymer solution containing varying amounts of polymer. Complexes were allowed to form for 30 min at room temperature, after which 20 μl was run on a 4% agarose gel. Bands were visualized with ethidium-bromide staining.

[0439] Cytotoxicity assay. siRNA-polymer complexes were formed by mixing equal amounts (50 pmol) of siRNA in 10 mM Hepes buffer, pH 7.2 with polymer solution containing varying amounts of polymer for 30 min at room temperature. Cytotoxicity was evaluated by MTT assay. Cells were seeded in 96-well plates at 30,000 cells per well in 0.2 ml of DMEM containing 10% fatal calf serum (FCS). After overnight incubation at 37° C., the medium was removed and replaced with 0.18 ml OPTI-MEM (GIBCO/BRL). siRNA-polymer complexes in 20 μl of Hepes buffer were added to the cells. After a 6-h incubation at 37° C., the polymer-containing medium was removed and replaced with DMEM-10% FCS. The metabolic activity of the cells was measured 24 h later using the MTT assay according to the manufacturer's instructions. Experiments were performed in triplicate, and the data was averaged.

[0440] Cell culture, transfection, siRNA-polymer complex formation, and viral titer determination. Vero cells were grown in DMEM containing 10% heat-inactivated FCS, 2 mM L-glutamine, 100 units/ml penicillin, and 100 μg/ml streptomycin at 37° C. under a 5% CO2/95% air atmosphere. For transfection experiments, logarithmic-phase Vero cells were seeded in 24-well plates at 4×10⁵ cells per well in 1 ml of DMEM-10% FCS. After overnight incubation at 37° C., siRNA-polymer complexes were formed by adding 50 μl of siRNA (400 pmol (about 700 ng) in 10 mM Hepes buffer, pH 7.2) to 50 μl of polymer vortexing. Different concentrations of polymer were used in order to achieve complete complex formation between the siRNA and polymer. The mixture was incubated at room temperature for 30 min to complete complex formation. The cell-growth medium was removed and replaced with OPTI-MEM I (Life Technologies) just before the complexes were added.

[0441] After incubating the cells with the complexes for 6 h at 37° C. under 5% CO₂, the complex-containing medium was removed and 200 μl of PR8 virus in infection medium, MOI=0.04, consisting of DMEM, 0.3% BSA (Sigma), 10 mM Hepes, 100 units/ml penicillin, and 100 μg/ml streptomycin, was added to each well. After incubation for 1 h at room temperature with constant rocking, 0.8 ml of infection medium containing 4 μg/ml trypsin was added to each well and the cells were cultured at 37° C. under 5% CO₂. At different times after infection, supernatants were harvested from infected cultures and the virus titer was determined by hemagglutination (HA) assay as described above.

[0442] Transfection of siRNA by Lipofectamine 2000 (Life Technology) was carried out according to the manufacturer's instruction for adherent cell lines. Briefly, logarithmic-phase Vero cells were seeded in 24-well plate at 4×10⁵ cells per well in 1 ml of DMEM-10% FCS and were incubated at 37° C. under 5% CO₂. On the next day, 50 μl of diluted Lipofectamine 2000 in OPTI-MEM I were added to 50 μl of siRNA (400 pmol in OPTI-MEM I) to form complexes. The cell were washed and incubated with serum-free medium. The complexes were applied to the cells and the cells were incubated at 37° C. for 6 h before being washed and infected with influenza virus as described above. At different times after infection, supernatants were harvested from infected cultures and the virus titer was determined by hemagglutination (HA) assay as described above.

[0443] Results

[0444] The ability of poly-L-lysine (PLL) and poly-L-arginine (PLA) to form complexes with siRNA and promote uptake of siRNA by cultured cells was tested. To determine whether PLL and/or PLA form complexes with siRNA, a fixed amount of NP-1496 siRNA was mixed with increasing amounts of polymer. Formation of polymer/siRNA complexes was then visualized by electrophoresis in a 4% agarose gel. With increasing amounts of polymer, electrophoretic mobility of siRNA was retarded (FIGS. 27A and 27B), indicating complex formation. FIGS. 27A and 27B represent complex formation between siRNAs and PLL (41.8K) or PLA, respectively. The amount of polymer used in each panel increases from left to right. In FIGS. 27A and 27B in each panel, a band can be seen in the lanes on the left, indicating lack of complex formation and hence entry of the siRNA into the gel and subsequent migration. As one moves to the right, the band disappears, indicating complex formation and failure of the complex to enter the gel and migrate.

[0445] To investigate cytotoxicity of siRNA/polymer complexes, mixtures of siRNA and PLL or PLA at different ratios were added to Vero cell cultures in 96-well plates. The metabolic activity of the cells were measured by MTT assay (74). Experiments were performed in triplicate, and data was averaged. Cell viability was significantly reduced with increasing amounts of PLL (MW ˜42K) whereas PLL (˜8K) showed significantly lower toxicity, exhibiting minimal or no toxicity at PLL/siRNA ratios as high as 4:1 (FIG. 28A; circles=PLL (MW˜8K); squares=PLL (MW˜42K)). Cell viability was reduced with increasing PLA/siRNA ratios as shown in FIG. 28B, but viability remained above 80% at PLA/siRNA ratios as high as 4.5:1. The polymer/siRNA ratio is indicated on the x-axis in FIGS. 28A and 28B. The data plotted in FIGS. 28A and 28B are presented in Tables 11 and 12. In Table 11 the numbers indicate % viability of cells following treatment with polymer/siRNA complexes, relative to % viability of untreated cells. ND=Not done. In Table 12 the numbers indicate PLA/siRNA ratio, % survival, and standard deviation as shown.

TABLE 11
Cytotoxicity of PLL/siRNA complexes (% survival)

| | polymer/siRNA ratio | | | | | |
|---|---|---|---|---|---|---|
| Treatment | 0.5 | 1.0 | 2.0 | 4.0 | 8.0 | 16.0 |
| PLL ˜8.4K | 92.26 | 83.57 | 84.39 | 41.42 | 32.51 | ND |
| PLL ˜41.8K | ND | 100 | 100 | 100 | 82.55 | 69.63 |

[0446] TABLE 12
Cytotoxicity of PLA/siRNA complexes (% survival)

| | polymer/siRNA ratio | | | | |
|---|---|---|---|---|---|
| | 0.17 | 0.5 | 1.5 | 4.5 | 13.5 |
| % survival | 94.61 | 100 | 92.33 | 83 | 39.19 |
| Standard deviation | .74 | 1.91 | 2.92 | 1.51 | 4.12 |

[0447] To determine whether PLL or PLA promotes cellular uptake of siRNA, various amounts of polymer and NP-1496 were mixed at ratios at which all siRNA was complexed with polymer. Equal amounts of siRNA were used in each case. A lower polymer/siRNA ratio was used for ˜42K PLL than for ˜8K PLL since the former proved more toxic to cells. The complexes were added to Vero cells, and 6 hrs later the cultures were infected with PR8 virus. At different times after infection, culture supernatants were harvested and assayed for virus by HA assay. FIG. 29A is a plot of virus titers over time in cells receiving various transfection treatments (circles=no treatment; squares=Lipofectamine; filled triangles=PLL (˜42K at PLL/siRNA ratio=2); open triangles=PLL (˜8K at PLL/siRNA ratio=8). As shown in FIG. 29A, virus titers increased with time in the non-transfected cultures. Virus titers were significantly lower in cultures that were transfected with NP-1496/Lipofectamine and were even lower in cultures treated with PLL/NP-1496 complexes. The data plotted in FIG. 29A are presented in Table 13A (NT=no treatment; LF2K=Lipofectamine. The PLL:siRNA ratio is indicated in parentheses.

[0448] PLA was similarly tested over a range of polymer/siRNA ratios. FIG. 29B is a plot of virus titers over time in cells receiving various transfection treatments (filled squares=mock transfection; filled circles=Lipofectamine; open squares=PLA at PLA/siRNA ratio=1; open circles=PLA at PLA/siRNA ratio=2; open triangles=PLA at PLA/siRNA ratio=4; filled triangles=PLA at PLA/siRNA ratio=8). As shown in FIG. 29B, virus titers increased with time in the control (mock-transfected) culture and in the culture treated with PLA/siRNA at a 1:1 ratio. Virus titers were significantly lower in cultures that were transfected with NP-1496/Lipofectamine and were even lower in cultures treated with PLA/siRNA complexes containing complexes at PLA/siRNA ratios of 4:1 or higher. Increasing amounts of polymer resulted in greater reduction in viral titer. The data plotted in FIG. 29B are presented in Table 13B.

TABLE 13A
Inhibition of influenza virus production by polymer/siRNA complexes

Time (hours)

| Treatment | 24 | 36 | 48 | 60 |
|---|---|---|---|---|
| mock transfection | 16 | 64 | 64 | 64 |
| LF2K | 4 | 8 | 16 | 16 |
| PLL ˜42K (2:1) | 1 | 4 | 8 | 8 |
| PLL ˜8K (8:1) | 1 | 2 | 4 | 8 |

[0449] TABLE 13B
Inhibition of influenza virus production by polymer/siRNA complexes

Time (hours)

| Treatment | 24 | 36 | 48 | 60 |
|---|---|---|---|---|
| mock transfection | 8 | 64 | 128 | 256 |
| LF2K | 2 | 6 | 16 | 32 |
| PLA (1:1) | 4 | 16 | 128 | 256 |
| PLA (2:1) | 4 | 16 | 32 | 64 |
| PLA (4:1) | 1 | 4 | 8 | 16 |
| PLA (8:1) | 1 | 1 | 1 | 2 |

[0450] Thus, cationic polymers promote cellular uptake of siRNA and inhibit influenza virus production in a cell line and are more effective than the widely used transfection reagent Lipofectamine. These results also suggest that additional cationic polymers may readily be identified to stimulate cellular uptake of siRNA and describe a method for their identification. PLL and PLA can serve as positive controls for such efforts.

### Example 16A

### Inhibition of Luciferase Activity in the Lung by Delivery of siRNA to the Vascular System or the Respiratory Tract

[0451] Materials and Methods

[0452] siRNAs were obtained from Dharmacon and were deprotected and annealed as described above. siRNA sequences for NP (NP-1496), PA (PA-2087), PB1 (PB1-2257), and GFP were as given above. Luc-specific siRNA was as described in (McCaffrey, A P, et al., Nature, 418:38-39)

[0453] PEI-mediated DNA transfection in mice. pCMV-luc DNA (Promega) was mixed with PEI (Qbiogene, Carlsbad, Calif.) at a nitrogen/phosphorus molar ratio (N/P ratio) of 10 at room temperature for 20 min. For i.v. administration, 200 μl of the mixture containing 60 μg of DNA was injected retroorbitally into 8 week old male C57BL/6 mice (Taconic Farms). For intratracheal (i.t.) adminstration, 50 μl of the mixture containing 30 μg or 60 μg of DNA was administered into the lungs of anesthetized mice using a Penn Century Model IA-IC insufflator.

[0454] PEI-mediated siRNA delivery in mice. siRNA-PEI compositions were formed by mixing 60 μg of luc-specific or GFP-specific siRNA with jetPEI at an N/P ratio of 5 at room temperature for 20 min. For i.v. administration, 200 μl of the mixture containing the indicated amounts of siRNA was injected retroorbitally. For pulmonary administration, 50 μl was delivered intratracheally.

[0455] Luc assay. At various times after pCMV-luc DNA administration, lungs, spleen, liver, heart, and kidney were harvested and homogenized in Cell Lysis Buffer (Marker Gene Technologies, Eugene, Oreg.). Luminescence was analyzed with the Luciferase Assay System (Promega) and measured with an Optocomp® I luminometer (MGM Instruments, Hamden, Conn.). The protein concentrations in homogenates were measured by the BCA assay (Pierce).

[0456] Results

[0457] To determine the tissue distribution of PEI-mediated nucleic acid delivery in mice, pCMV-luc DNA-PEI complexes were injected i.v., and 24 hr later, Luc activity was measured in various organs. Activity was highest in the lungs, where Luc activity was detected for at least 4 days (FIG. 30A), whereas in heart, liver, spleen, and kidney, levels were 100-1,000 times lower and were detected for a shorter time after injection. When DNA-PEI complexes were instilled i.t., significant Luc activity was also detected in the lungs, although at a lower level than after i.v. adminstration (FIG. 30B).

[0458] To test the ability of PEI to promote uptake of siRNAs by the lungs following i.v. administration, mice were first given pCMV-luc DNA-PEI complexes i.t., followed by i.v. injection of Luc-specific siRNA complexed with PEI, control GFP-specific siRNA complexed with PEI, or the same volume of 5% glucose. Twenty-four hours later, Luc activity in the lungs was 17-fold lower in mice that received Luc siRNA than in those given GFP siRNA or no treatment (FIG. 30C). Because Luc siRNA can inhibit Luc expression only in the same lung cells that were transfected with the DNA vector, these results indicate that i.v. injection of a siRNA-PEI mixture achieves effective inhibition of a target transcript in the lung.

[0459] To test the ability of PEI to promote uptake of siRNAs by the lungs following pulmonary administration, mice were first given pCMVDNA-PEI complexes i.v., followed immediately by i.t. administration of Luc-specific siRNA mixed with PEI, control GFP-specific siRNA mixed with PEI, or the same volume of 5% glucose. Twenty-four hours later, luciferase activities were assayed in lung homogenates. FIG. 30D shows luciferase activity in lung homogenates from mice given either luciferase-specific or GFP-specific siRNA, normalized to protein amounts. Luciferase activity was 6.8-fold lower in mice that were treated with luciferase siRNA than those treated with GFP siRNA. These results indicate that pulmonary administration of an siRNA-PEI mixture achieves effective inhibition of a target transcript in lung cells.

### Example 16B

### Inhibition of Cyclophilin B in the Lung by Delivery of siRNA to the Respiratory System

[0460] Cyclophilin B is an endogenous gene that is widely expressed in mammals. To assess the ability of siRNA delivered directly to the respiratory system to inhibit expression of an endogenous gene, outbred Blackswiss mice (around 30 g or more body weight) were anesthetized by isofluorane/oxygen, and siRNA targeted to cyclophilin B (Dharmacon, D-001136-01-20 siCONTROL Cyclophilin B siRNA (Human/Mouse/Rat) or control GFP-949 siRNA (2 mg/kg) was administered intranasally to groups of 2 mice for each siRNA. Lungs were harvested 24 hours after administration. RNA was extracted from the lung and reverse transcription was done using a random primer. Real time PCR was then performed using cyclophilin B and GAPDH Taqman gene expression assay (Applied Biosystems). Results (Table 14) showed 70% silencing of cyclophilin B by siRNA targeted to cyclophilin B.

TABLE 14
Inhibition of Cyclophilin B in the Lung

| | | Ave | |
|---|---|---|---|
| Average | Normalized | normal | silencing % |
| PBS-1 | 5.395406 | 4.288984 | |
| PBS-2 | 3.182562 | | |
| GFP-1 | 2.547352 | 3.752446 | 12.50968 |
| GFP-2 | 4.957539 | | |
| Cyclo-1 | 1.173444 | 1.256672 | 70.7 |
| Cyclo-2 | 1.339901 | | |

### Example 17

### Selection of Favorably Conserved Target Portions

[0461] To identify favorably conserved regions of various influenza virus A transcripts for use as target portions against which to target RNAi-inducing agents to inhibit expression in a wide variety of strains, genome segments from a set of virus strains isolated from humans were aligned (in their positive sense form, i.e., the sequences found in mRNA). The strains included a number of strains in addition to those listed in Example 1. Tables 15A-15H list the Genbank accession number (left column), strain name (middle column), and serotype (right column) of the influenza A virus genome segments that were used to identify favorably conserved regions. The entire sequence of each segment was aligned and compared, with the exception of introns. 5′ and 3′ untranslated regions were included. The set of strains that was aligned differed for different segments, but each set included at least 19 strains isolated in various years spanning the time between 1934 and 2004. The strains included all HA and NA types known to circulate in humans (H1, H2, H3, H5, H9, N1, N2).

TABLE 15A
Influenza A virus NP segment (strains isolated from humans)

| | | |
|---|---|---|
| AF389119 | A/Puerto Rico/8/34/Mount Sinai | H1N1 |
| M63752 | A/Singapore/1/57 | H2N2 |
| M23976 | A/Ann Arbor/6/60 | H2N2 |
| AY210103 | A/Korea/426/68 | H2N2 |
| M76606 | A/New Jersey/8/76 | H1N1 |
| L07351 | A/Memphis/18/78 | H3N2 |
| AJ628066 | A/Fiji/15899/83 | H1N1 |
| L07369 | A/Memphis/3/88 | H3N2 |
| M63755 | A/Wisconsin/3523/88 | H1N1 |
| L07373 | A/Guangdong/38/89 | H3N2 |
| L07357 | A/Shanghai/6/90 | H3N2 |
| L24394 | A/MD/12/91 | H1N1 |
| AF038254 | A/Kitakyushu/159/93 | H3N2 |
| AB019358 | A/Nagasaki/48/95 | H3N2 |
| AJ291400 | A/Hong Kong/156/97 | H5N1 |
| AF255749 | A/Hong Kong/498/97 | H3N2 |
| AF255752 | A/Hong Kong/542/97 | H5N1 |
| AF038259 | A/Shiga/25/97 | H3N2 |
| AF255753 | A/Hong Kong/97/98 | H5N1 |
| AF342819 | A/Wisconsin/10/98 | H1N1 |
| AJ289871 | A/Hong Kong/1073/99 | H9N2 |
| AJ458276 | A/Switzerland/9243/99 | H3N2 |
| ISDN13443 | A/Sydney/274/2000 | H3N2 |
| AB126624 | A/Yokohama/22/2002 | H1N2 |
| AY575905 | A/Hong Kong/212/03 | H5N1 |
| AY526749 | A/Viet Nam/1196/04 | H5N1 |

[0462] TABLE 15B
Influenza A virus PA transcripts (strains isolated from humans)

| | | |
|---|---|---|
| AF389117 | A/Puerto Rico/8/34/Mount Sinai | H1N1 |
| M26078 | A/Singapore/1/57 | H2N2 |
| M23974 | A/Ann Arbor/6/60 | H2N2 |
| M26079 | A/Korea/426/68 | H2N2 |
| AJ605762 | A/Fiji/15899/83 | H1N1 |
| AF037424 | A/Kitakyushu/159/93 | H3N2 |
| U71138 | A/Shiga/20/95 | H3N2 |
| AJ289874 | A/Hong Kong/156/97 | H5N1 |
| AF257198 | A/Hong Kong/498/97 | H3N2 |
| AF257201 | A/Hong Kong/542/97 | H5N1 |
| AF037429 | A/Shiga/25/97 | H3N2 |
| AF258519 | A/Hong Kong/427/98 | H1N1 |
| AF257202 | A/Hong Kong/97/98 | H5N1 |
| AY043028 | A/Guangzhoul333/99 | H9N2 |
| AF257191 | A/Hong Kong/1073/99 | H9N2 |
| AJ293922 | A/Hong Kong/1774/99 | H3N2 |
| AB126627 | A/Yokohama/22/2002 | H1N2 |
| AY576404 | A/Hong Kong/212/03 | H5N1 |
| AY526750 | A/Viet Nam/1196/04 | H5N1 |

[0463] TABLE 15C
Influenza A virus PB1 transcripts (strains isolated from humans)

| | | |
|---|---|---|
| AF389116 | A/Puerto Rico/8/34/Mount Sinai | H1N1 |
| M25924 | A/Singapore/1/57 | H2N2 |
| M23972 | A/Ann Arbor/6/60 | H2N2 |
| M25935 | A/Korea/426/68 | H2N2 |
| AJ564807 | A/Fiji/15899/83 | H1N1 |
| AF037418 | A/Kitakyushu/159/93 | H3N2 |
| U71130 | A/Shiga/20/95 | H3N2 |
| AJ404633 | A/Hong Kong/156/97 | H5N1 |
| AF258823 | A/Hong Kong/498/97 | H3N2 |
| AF258826 | A/Hong Kong/542/97 | H5N1 |
| AF037423 | A/Shiga/25/97 | H3N2 |
| AF258526 | A/Hong Kong/427/98 | H1N1 |
| AF258827 | A/Hong Kong/97/98 | H5N1 |
| AY043029 | A/Guangzhou/333/99 | H9N2 |
| AF258816 | A/Hong Kong/1073/99 | H9N2 |
| AJ293921 | A/Hong Kong/1774/99 | H3N2 |
| AJ489539 | A/England/627/01 | H1N2 |
| AB126625 | A/Yokohama/22/2002 | H1N2 |
| AY576392 | A/Hong Kong/212/03 | H5N1 |
| AY526751 | A/Viet Nam/1196/04 | H5N1 |

[0464] TABLE 15D
Influenza A virus PB2 transcripts (strains isolated from humans)

| | | |
|---|---|---|
| AF389115 | A/Puerto Rico/8/34/Mount Sinai | H1N1 |
| M73521 | A/Singapore/1/57 | H2N2 |
| M23970 | A/Ann Arbor/6/60 | H2N2 |
| M73524 | A/Korea/426/68 | H2N2 |
| M91712 | A/Udorn/307/72 | H3N2 |
| AJ564805 | A/Fiji/15899/83 | H1N1 |
| AF037412 | A/Kitakyushu/159/93 | H3N2 |
| U53158 | A/Wisconsin/4754/94 | H1N1 |
| U71134 | A/Shiga/20/95 | H3N2 |
| AF036363 | A/Hong Kong/156/97 | H5N1 |
| AF258842 | A/Hong Kong/498/97 | H3N2 |
| AF258845 | A/Hong Kong/542/97 | H5N1 |
| AF037417 | A/Shiga/25/97 | H3N2 |
| AF258525 | A/Hong Kong/427/98 | H1N1 |
| AF258846 | A/Hong Kong/97/98 | H5N1 |
| AF342824 | A/Wisconsin/10/98 | H1N1 |
| AY043030 | A/Guangzhou/333/99 | H9N2 |
| AJ404630 | A/Hong Kong/1073/99 | H9N2 |
| AJ293920 | A/Hong Kong/1774/99 | H3N2 |
| AJ489485 | A/England/627/01 | H1N2 |
| AB126626 | A/Yokohama/22/2002 | H1N2 |
| AY576380 | A/Hong Kong/212/03 | H5N1 |
| AY526752 | A/Viet Nam/1196/04 | H5N1 |

[0465] TABLE 15E
Influenza A virus M transcripts (strains isolated from humans)

| | | |
|---|---|---|
| AF389121 | A/Puerto Rico/8/34/Mount Sinai | H1N1 |
| X08093 | A/Singapore/1/57 | H2N2 |
| M23978 | A/Ann Arbor/6/60 | H2N2 |
| M63531 | A/Korea/426/68 | H2N2 |
| J02167 | A/udorn/72 | H3N2 |
| AJ298947 | A/Fiji/15899/83 | H1N1 |
| U65562 | A/Kitakyushu/159/93 | H3N2 |
| U53168 | A/Wisconsin/4754/94 | H1N1 |
| U65573 | A/Shiga/20/95 | H3N2 |
| AJ458306 | A/Sauth Africa/1147/96 | H3N2 |
| AF036358 | A/Hong Kong/156/97 | H5N1 |
| AF255370 | A/Hong Kong/498/97 | H3N2 |
| AF255373 | A/Hong Kong/542/97 | H5N1 |
| AF038274 | A/Shiga/25/97 | H3N2 |
| AF258523 | A/Hong Kong/427/98 | H1N1 |
| AF255374 | A/Hong Kong/97/98 | H5N1 |
| AF342818 | A/Wisconsin/10/98 | H1N1 |
| AY043025 | A/Guangzhou/333/99 | H9N2 |
| AF255363 | A/Hong Kong/1073/99 | H9N2 |
| AJ293925 | A/Hong Kong/1774/99 | H3N2 |
| AJ458304 | A/Saudi Arabia/7971/2000 | H1N1 |
| AJ489530 | A/England/627/01 | H1N2 |
| AB126629 | A/Yokohama/22/2002 | H1N2 |
| AY575893 | A/Hong Kong/212/03 | H5N1 |
| AY526748 | A/Viet Nam/1196/04 | H5N1 |

[0466] TABLE 15F
Influenza A virus NS transcripts (strains isolated from humans)

| | | |
|---|---|---|
| AF389122 | A/Puerto Rico/8/34/Mount Sinai | H1N1 |
| AY210151 | A/Singapore/1/57 | H2N2 |
| AY210161 | A/Ann Arbor/6/60 | H2N2 |
| AY210191 | A/Korea/426/68 | H2N2 |
| V01102 | A/UDORN/72 | H3N2 |
| AJ298950 | A/Fiji/15899/83 | H1N1 |
| D30676 | A/Kitakyushu/159/93 | H3N2 |
| U53170 | A/Wisconsin/4754/94 | H1N1 |
| U65673 | A/Shiga/20/95 | H3N2 |
| AF036360 | A/Hong Kong/156/97 | H5N1 |
| AF256183 | A/Hong Kong/498/97 | H3N2 |
| AF256187 | A/Hong Kong/542/97 | H5N1 |
| AF038279 | A/Shiga/25/97 | H3N2 |
| AF258521 | A/Hong Kong/427/98 | H1N1 |
| AF256188 | A/Hong Kong/97/98 | H5N1 |
| AF342817 | A/Wisconsin/10/98 | H1N1 |
| AY043027 | A/Guangzhou/333/99 | H9N2 |
| AF256177 | A/Hong Kong/1074/99 | H9N2 |
| AJ293941 | A/Hong Kong/1774/99 | H3N2 |
| AJ519463 | A/Saudi Arabia/7971/2000 | H1N1 |
| AJ489552 | A/England/627/01 | H1N2 |
| AB126628 | A/Yokohama/22/2002 | H1N2 |
| AY576368 | A/Hong Kong/212/03 | H5N1 |
| AY526747 | A/Viet Nam/1196/04 | H5N1 |

[0467] TABLE 15G
Influenza A virus NA transcripts (strains isolated from humans)

| | | |
|---|---|---|
| AF389120 | A/Puerto Rico/8/34/Mount Sinai | H1N1 |
| AY209895 | A/Singapore/1/57 | H2N2 |
| AY209903 | A/Ann Arbor/6/60 | H2N2 |
| AY209932 | A/Korea/426/68 | H2N2 |
| M27970 | A/New Jersey/8/76 | H1N1 |
| K01017 | A/Memphis/10/78 | H1N1 |
| AJ006954 | A/Fiji/15899/83 | H1N1 |
| U42634 | A/England/427/88 | H3N2 |
| U47816 | A/Wisconsin/3523/88 | H1N1 |
| U42636 | A/Shanghai/24/90 | H3N2 |
| U42774 | A/California/271/92 | H3N2 |
| AF038260 | A/Kitakyushu/159/93 | H3N2 |
| AJ457945 | A/Nanchang/933/95 | H3N2 |
| AF036357 | A/Hong Kong/156/97 | H5N1 |
| AF102670 | A/Hong Kong/542/97 | H5N1 |
| AF038264 | A/Shiga/25/97 | H3N2 |
| AF102661 | A/Hong Kong/97/98 | H5N1 |
| AF533749 | A/Montevideo/2728/98 | H3N2 |
| AY043022 | A/Shaoguan/408/98 | H9N2 |
| AF342820 | A/Wisconsin/10/98 | H1N1 |
| AJ404629 | A/Hong Kong/1073/99 | H9N2 |
| AJ293923 | A/Hong Kong/1774/99 | H3N2 |
| AJ307628 | A/Montreal/MTL516/00 | H3N2 |
| AF503466 | A/Singapore/63/2001 | H1N2 |
| AJ457947 | A/Ireland/1092/2002 | H3N2 |
| AB126623 | A/Yokohama/22/2002 | H1N2 |
| AY575881 | A/Hong Kong/212/03 | H5N1 |
| AY555151 | A/Thailand/1-KAN-1/2004 | H5N1 |
| AY526746 | A/Viet Nam/1196/04 | H5N1 |

[0468] TABLE 15H
Influenza A virus HA transcripts (strains isolated from humans)

| | | |
|---|---|---|
| AF389118 | A/Puerto Rico/8/34/Mount Sinai | H1N1 |
| L20410 | A/Singapore/1/57 | H2N2 |
| AF270721 | A/Ann Arbor/6/60 | H2N2 |
| L11133 | A/Korea/426/68 | H2N2 |
| AY661044 | A/Bilthoven/628/76 | H3N2 |
| AJ289702 | A/Fiji/15899/83 | H1N1 |
| AY661055 | A/England/427/88 | H3N2 |
| L33755 | A/Finland/75/88 | H1N1 |
| AY661074 | A/Shanghai/24/90 | H3N2 |
| AF008817 | A/California/271/92 | H3N2 |
| D30669 | A/Kitakyushu/159/93 | H3N2 |
| AF008725 | A/Nanchang/933/95 | H3N2 |
| AF036356 | A/Hong Kong/156/97 | H5N1 |
| AF102678 | A/Hong Kong/542/97 | H5N1 |
| AJ311466 | A/Sydney/5/97 | H3N2 |
| AF102676 | A/Hong Kong/97/98 | H5N1 |
| AY271794 | A/Memphis/31/98 | H3N2 |
| AY043017 | A/Shaoguan/408/98 | H9N2 |
| AF342821 | A/Wisconsin/10/98 | H1N1 |
| AJ404626 | A/Hong Kong/1073/99 | H9N2 |
| AJ293926 | A/Hong Kong/1774/99 | H3N2 |
| ISDNOS0022 | A/Oslo/6391/2000 | H3N2 |
| AF503481 | A/Singapore/63/2001 | H1N2 |
| AY661030 | A/Netherlands/120/02 | H3N2 |
| AB126622 | A/Yokohama/22/2002 | H1N2 |
| AY575869 | A/Hong Kong/212/03 | H5N1 |
| AY555150 | A/Thailand/1-KAN-1/2004 | H5N1 |
| AY526745 | A/Viet Nam/1196/04 | H5N1 |

[0469] In order to identify a set of preferred target portions among a large set of influenza A virus strains, we selected the sequence of the PR8 strain as a base sequence. We used the entire sequence of each segment, excluding introns. The sequences are shown in FIGS. 32A-32J (SEQ ID NOs: 383-392). These sequences were concatenated to form a single long sequence in the following order: NP, PB2, PB1, PA, M1, M2, NS1, NS2, HA, NA. Portions of the sequence having a length of 19 nucleotides were identified by starting at the 5′ end, applying a 19 nucleotide “window” to select the first potential target portion, and then shifting the window in the 3′ direction by 1 nucleotide at a time in order to select the next potential target portion. This process was continued until the 3′ end of the transcript was reached. Every 19 nucleotide region was considered to represent a potential target portion, though it was recognized that shorter or longer target portions could also have been selected. Regions that encompassed portions of two different transcripts were excluded. The sequences of the 13,472 potential target portions that resulted from this process may readily be determined by referring to SEQ ID NOs: 383-392 in FIG. 32. The target portions extend, for example, from positions 1-19, 2-20, 3-21, 4-22, 5-23, 6-24, etc., in each sequence. In the NP transcript (SEQ ID NO: 383), the target portions are 1-19, 2-20, 3-21, 4-22 . . . 1547-1565. In the PB2 (SEQ ID NO: 384) transcript, the target portions are 1-19, 2-20, 3-21, 4-22 . . . 2323-2341. In the PB1 transcript (SEQ ID NO: 385), the target portions are 1-19, 2-20, 3-21, 4-22 . . . 2323-2341. In the PA transcript (SEQ ID NO: 386), the target portions are 1-19, 2-20, 3-21, 4-22 . . . 2215-2233. In the M1 transcript (SEQ ID NO: 387), the target portions are 1-19, 2-20, 3-21, 4-22 . . . 1009-1027. In the M2 transcript (SEQ ID NO: 388), the target portions are 1-19, 2-20, 3-21, 4-22 . . . 321-339. In the NS1 transcript (SEQ ID NO: 389), the target portions are 1-19, 2-20, 3-21, 4-22 . . . 872-890. In the NS2 transcript (SEQ ID NO: 390), the target portions are 1-19, 2-20, 3-21, 4-22 . . . 400-418. In the HA transcript (SEQ ID NO: 391), the target portions are 1-19, 2-20, 3-21, 4-22 . . . 1767-1775. In the NA transcript, the target portions are 1-19, 2-20, 3-21, 4-22 . . . 1395-1413 (SEQ ID NO: 392). For illustrative purposes the first 6 target portions of the NP transcript are listed in Table 16.

TABLE 16
Target Portions in NP Gene

| | | Nucleo- |
|---|---|---|
| ID | | tide |
| Number | Sequence | Position |
| 1 | AGCAAAAGCAGGGTAGATA (SEQ ID NO: 394) | 1-19 |
| 2 | GCAAAAGCAGGGTAGATAA (SEQ ID NO: 395) | 2-20 |
| 3 | CAAAAGCAGGGTAGATAAT (SEQ ID NO: 396) | 3-21 |
| 4 | AAAAGCAGGGTAGATAATC (SEQ ID NO: 397) | 4-22 |
| 5 | AAAGCAGGGTAGATAATCA (SEQ ID NO: 398) | 5-23 |
| 6 | AAGCAGGGTAGATAATCAC (SEQ ID NO: 399) | 6-24 |

[0470] Potential target portions were subjected to a selection step to identify target portions having preferred features for inhibition by RNAi-inducing agents. Criteria applied in the selection step included a filter based on GC content, and a filter based on the presence or absence of consecutive stretches G or C nucleotides. For example, preferred RNAi-inducing agent inhibitory regions preferably contain less than 70% G or C nucleotides and preferably do not contain continuous stretches of more than 3 G nucleotides or more than 3 C nucleotides. Therefore preferred target portions contain less than 70% G or C nucleotides and preferably do not contain continuous stretches of more than 3 G nucleotides or more than 3 C nucleotides. The target portions that remained after application of the filter are referred to as “functional target portions”. The 2,244 functional target portions are listed in Table 17.

[0471] The sequences of the functional target portions from PR8 were compared with the sequences of the corresponding target portions of the other strains listed in Tables 15A -15H. The corresponding target portions in the other strains were readily identified based on their position in the segments and on their sequences, which were generally substantially identical with the target portion in PR8.

[0472] We recognized that in accordance with the “wobble rules”, GU base pairing can occur. We also recognized that the importance of maintaining complementarity between the antisense strand and the target differs at different positions. We therefore identified target portions for which at least 80% of the strains compared with PR8 met the following criteria when the target portion in PR8 was compared with the corresponding target portion in the strain, with both being aligned in the 5′ to 3′ direction: (1) An A to G or C to U difference between the PR8 sequence and the corresponding sequence is allowed at any position; (2) A G to A or C to A difference between the PR8 sequence and the corresponding sequence is allowed at only one or more of positions 1, 18, and 19; (3) There are 0, 1, 2, or 3 differences between the PR8 sequence and the corresponding sequence between positions 1 and 9; (4) There are no more than 2 consecutive differences between the PR8 sequence and the corresponding sequence; and (5) There is at most 1 difference between the PR8 sequence and the corresponding sequence between positions 11 and 17.

[0473] Target portions that meet the foregoing criteria were designated as “favorably conserved target portions”. The sequences of the 220 target portions that are favorably conserved among influenza strains derived from humans are listed in Table 18. The target portions were from transcripts NP, PB2, PB1, PA, M, NS, and HA. These favorably conserved target portions are preferred targets for inventive RNAi-inducing agents for inhibition of a plurality of different human derived influenza A virus strains and are perfectly complementary to the inhibitory region of certain preferred antisense strands.

[0474] Following selection of the favorably conserved target portions, corresponding target portions from influenza A virus strains isolated avians (including duck, chicken, gull, teal, tern, quail, pheasant, turkey, goose, pigeon, falcon, and various other birds), or from the environment (presumed to be of avian origin) were aligned and compared with the target portions identified from human derived strains. The strains included a large number of strains in addition to those listed in Example 1. Tables 19A-19F list the Genbank accession number (left column), strain name (middle column), and serotype (right column) of the influenza A virus genome segments that were used (in their positive sense form) to identify favorably conserved target portions. The set of strains that was aligned differed for different segments but that each set included at least 30 strains isolated in various years spanning 1934-2004. The same selection criteria used for identification of favorably conserved target portions from human derived strains were applied. The result was 138 target portions that are favorably conserved among both human and avian derived strains. The target portions were from transcripts NP, PB2, PB 1, PA, M, and NS. These favorably conserved target portions are listed in Table 20. These target portions are preferred targets for inventive RNAi-inducing agents for inhibition of a plurality of different human derived and avian derived influenza A virus strains and are perfectly complementary to the inhibitory region of certain preferred antisense strands of inventive RNAi-inducing agents.

TABLE 19A
Influenza A virus PA transcripts (strains isolated from avians)

| | | |
|---|---|---|
| M21850 | A/chicken/FPV/Rostock/34 | H7N1 |
| M26088 | A/Gull/Maryland/704/77 | H13N6 |
| M26085 | A/pintail/Alberta/119/79 | H4N6 |
| AY633193 | A/mallard/Alberta/203/93 | H6N5 |
| AY633305 | A/mallard/Alberts/76/94 | H6N8 |
| AF098606 | A/Chicken/Hong Kong/728/97 | H5N1 |
| AF156444 | A/Chicken/Hong Kong/G9/97 | H9N2 |
| AY633393 | A/teal/Alberta/16/97 | H2N9 |
| AF536676 | A/Chicken/Henan/98 | H9N2 |
| AJ291397 | A/Chicken/Pakistan/2/99 | H9N2 |
| AF216731 | A/Environment/Hong Kong/437-8/99 | H5N1 |
| AY633353 | A/pintail/Alberta/207/99 | H4N8 |
| AY180690 | A/Bantam/Nanchang/9-366/2000 | H3N3 |
| AF508676 | A/Chicken/Henan/62/00 | H9N2 |
| AY059530 | A/Duck/Hong Kong/ww461/2000 | H5N1 |
| AY180683 | A/Duck/Nanchang/4-191/2000 | H4N6 |
| AF523462 | A/Duck/Shantou/2030/00 | H9N1 |
| AY180693 | A/Quail/Nanchang/4-034/2000 | H4N6 |
| AY180696 | A/Quail/Nanchang/4-040/2000 | H9N2 |
| AF457716 | A/chicken/California/1002a/00 | H6N2 |
| AY633153 | A/mallard/Alberta/127/00 | H3N8 |
| AF509210 | A/Chicken/Hong Kong/866.3/01 | H5N1 |
| AY180709 | A/Quail/Nanchang/2-040/2001 | H3N6 |
| AF523454 | A/Wild Duck/Shantou/4808/01 | H9N2 |
| AF457683 | A/chicken/California/6643/01 | H6N2 |
| AY180678 | A/chicken/Nanchang/3-201/01 | H3N6 |
| AY422033 | A/duck/Hokkaido/86/01 | H2N3 |
| AY303660 | A/chicken/Chile/176822/02 | H7N3 |
| AY576411 | A/chicken/Hong Kong/61.9/02 | H5N1 |
| AY586433 | A/turkey/Italy/220158/2002 | H7N3 |
| AY342420 | A/chicken/Netherlands/1/03 | H7N7 |
| AY616764 | A/chicken/British Columbia/04 | H7N3 |
| AY609311 | A/chicken/Guangdong/174/04 | H5N1 |

[0475] TABLE 19B
Influenza A virus PB1 transcripts (strains isolated from avians)

| | | |
|---|---|---|
| U48280 | A/Duck/hong Hong/62/76 | H11N2 |
| M25933 | A/gull/Maryland/704/77 | H13N6 |
| M25925 | A/Turkey/Minnesota/833/80 | H4N2 |
| AY633210 | A/Mallard/Alberta/206/96 | H6N8 |
| AY633186 | A/mallard/Alberta/202/96 | H2N5 |
| AF098592 | A/Chicken/Hong Kong/728/97 | H5N1 |
| AF156416 | A/Chicken/Hong Kong/G9/97 | H9N2 |
| AY633394 | A/teal/Alberta/16/97 | H2N9 |
| AF536666 | A/Chicken/Henan/98 | H9N2 |
| AF508626 | A/Chicken/Korea/99029/99 | H9N2 |
| AF216732 | A/Environment/Hong Kong/437-8/99 | H5N1 |
| AY633354 | A/pintail/Alberta/207/99 | H4N8 |
| AY180888 | A/Bantam/Nanchang/9-366/2000 | H3N3 |
| AY180885 | A/Duck/Nanchang/4-191/2000 | H4N6 |
| AF523445 | A/Duck/Shantou/2030/00 | H9N1 |
| AY180891 | A/Quail/Nanchang/4-034/2000 | H4N6 |
| AY180892 | A/Quail/Nanchang/4-040/2000 | H9N2 |
| AF457698 | A/chicken/California/431/00 | H6N2 |
| AY633154 | A/mallard/Alberta/127/00 | H3N8 |
| AF509184 | A/Chicken/Hong Kong/866.3/01 | H5N1 |
| AY180893 | A/Chicken/Nanchang/1-101/2001 | H3N6 |
| AY180864 | A/Quail/Nanchang/2-040/2001 | H3N6 |
| AF523431 | A/Wild Duck/Shantou/4808/01 | H9N2 |
| AY180872 | A/chicken/Nanchang/3-201/01 | H3N6 |
| AY422037 | A/duck/Hokkaido/86/01 | H2N3 |
| AY303664 | A/chicken/Chile/4957/02 | H7N3 |
| AY576400 | A/chicken/Hong Kong/YU777/02 | H5N1 |
| AY586436 | A/turkey/Italy/220158/2002 | H7N3 |
| AY340085 | A/chicken/Netherlands/1/03 | H7N7 |
| AY616765 | A/chicken/British Columbia/04 | H7N3 |
| AY609310 | A/chicken/Guangdong/174/04 | H5N1 |
| AY590582 | A/chicken/Nakorn-Patom/Thailand/CU-K2/2004 | H5N1 |

[0476] TABLE 19C
Influenza A virus PB2 transcripts (strains isolated from avians)

| | | |
|---|---|---|
| M73514 | A/Turkey/Minnesota/833/80 | H4N2 |
| M73516 | A/Gull/Astrakhan/227/84 | H13N6 |
| AF268115 | A/Ruddy Turnstone/Delaware/168/94 | H3N4 |
| AY633243 | A/mallard/Alberta/232/94 | H6N8 |
| AF268119 | A/Shorebird/Delaware/23/96 | H10N9 |
| AF508651 | A/Chicken/Guangdong/11/97 | H9N2 |
| AF098579 | A/Chicken/Hong Kong/728/97 | H5N1 |
| AF156430 | A/Chicken/Hong Kong/G9/97 | H9N2 |
| AF536686 | A/Chicken/Henan/98 | H9N2 |
| AJ410602 | A/duck/Hong Kong/323/98 | H6N2 |
| AF508642 | A/Chicken/Pakistan/5/99 | H9N2 |
| AF216733 | A/Environment/Hong Kong/437-8/99 | H5N1 |
| AY633355 | A/pintail/Alberta/207/99 | H4N8 |
| AY180775 | A/Bantam/Nanchang/9-366/2000 | H3N3 |
| AY180770 | A/Duck/Nanchang/4-191/2000 | H4N6 |
| AF523481 | A/Duck/Shantou/2030/00 | H9N1 |
| AY180772 | A/Quail/Nanchang/4-034/2000 | H4N6 |
| AY180773 | A/Quail/Nanchang/4-040/2000 | H9N2 |
| AF457689 | A/chicken/California/465/00 | H6N2 |
| AY633155 | A/mallard/Alberta/127/00 | H3N8 |
| AF509158 | A/Chicken/Hong Kong/866.3/01 | H5N1 |
| AY180759 | A/Quail/Nanchang/2-040/2001 | H3N6 |
| AF523464 | A/Wild Duck/Shantou/4808/01 | H9N2 |
| AF457681 | A/chicken/California/6643/01 | H6N2 |
| AY180763 | A/chicken/Nanchang/3-201/01 | H3N6 |
| AY422041 | A/duck/Hokkaido/86/01 | H2N3 |
| AY576388 | A/chicken/Hong Kong/YU777/02 | H5N1 |
| AJ627496 | A/turkey/Italy/220158/2002 | H7N3 |
| AY342413 | A/avian/Netherlands/219/03 | H7N7 |
| AY342414 | A/chicken/Netherlands/1/03 | H7N7 |
| AY616766 | A/chicken/British Columbia/04 | H7N3 |
| AY609309 | A/chicken/Guangdong/174/04 | H5N1 |
| AY590681 | A/chicken/Nakorn-Patom/Thailand/CU-K2/2004 | H5N1 |

[0477] TABLE 19D
Influenza A virus M transcripts (strains isolated from avians)

| | | |
|---|---|---|
| M23917 | A/chicken/FPV/Weybridge | H7N7 |
| M63538 | A/Gull/Massachusetts/26/80 | H13N6 |
| AJ427302 | A/curlew sandpiper/Hong Kong/208/89 | H10N5 |
| U49117 | A/Duck/Nanchang/1749/92 | H11N2 |
| AF073180 | A/Chicken/New Jersey/15086-3/94 | H7N3 |
| AF098562 | A/Chicken/Hong Kong/728/97 | H5N1 |
| AF156458 | A/Chicken/Hong Kong/G9/97 | H9N2 |
| AF250487 | A/Duck/Hong Kong/P169/97 | H3N8 |
| AF250489 | A/Duck/Hong Kong/P54/97 | H11N9 |
| AF250490 | A/Duck/Hong Kong/T25/97 | H11N8 |
| AF250492 | A/Duck/Hong Kong/Y264/97 | H4N8 |
| AY633389 | A/teal/Alberta/16/07 | H2N9 |
| AF536726 | A/Chicken/Henan/98 | H9N2 |
| AY241600 | A/Chicken/NY/12273-11/99 | H7N3 |
| AF216727 | A/Environment/Hong Kong/437-8/99 | H5N1 |
| AJ427299 | A/aquatic bird/Hong Kong/399/99 | H3N8 |
| AY633349 | A/pintail/Alberta/207/99 | H3N3 |
| AY180518 | A/Bantam/Nanchang/9-366/2000 | H3N3 |
| AY180509 | A/Duck/Nanchang/4191/2000 | H4N6 |
| AF523500 | A/Duck/Shantou/2030/00 | H9N1 |
| AY180507 | A/Quail/Nanchang/4-034/2000 | H4N6 |
| AY180504 | A/Quail/Nanchang/4-040/2000 | H9N2 |
| AY300962 | A/avian/NY/53726/00 | H5N2 |
| AY633149 | A/mallard/Alberta/127/00 | H3N8 |
| AF474055 | A/Chicken/California/6643/2001 | H6N2 |
| AF509055 | A/Chicken/Hong Kong/866.3/01 | H5N1 |
| AY180523 | A/Quail/Nanchang/2-040/2001 | H3N6 |
| AF523484 | A/Wild Duck/Shantou/4804/01 | H9N2 |
| AY300975 | A/blue-winged teal/TX/2/01 | H7N3 |
| AY180505 | A/chicken/Nanchang/3-201/01 | H3N6 |
| AY422020 | A/duck/Hokkaido/86/01 | H2N3 |
| AY241624 | A/Turkey/VA/67/02 | H7N2 |
| AY300974 | A/duck/NY/191255-59/02 | H5N8 |
| AY300971 | A/turkey/CA/D0208651-C/02 | H5N2 |
| AJ627497 | A/turkey/Italy/220168/2002 | H7N3 |
| AY340091 | A/chicken/Netherlands/1/03 | H7N7 |
| AY611525 | A/chicken/British Columbia/04 | H7N3 |
| AY609315 | A/chicken/Guangdong/174/04 | H5N1 |
| AY590578 | A/chicken/Nakorn-Patom/Thailand/CU-K2/2004 | H5N1 |

[0478] TABLE 19E
Influenza A virus NS transcripts (strains isolated from avians)

| | | |
|---|---|---|
| J02105 | A/duck/Alberta/60/76 | H12N5 |
| U96743 | A/Gull/Maryland/1824/78 | H13N9 |
| U96739 | A/Chicken/Pennsylvania/1370/83 | H13N6 |
| AF007035 | A/Duck/Ohio/421/87 | H7N8 |
| AF074267 | A/Chicken/New Jersey/15086-3/94 | H7N3 |
| AF156472 | A/Chicken/Hong Kong/G9/97 | H9N2 |
| AF319651 | A/Chicken/Italy/9097/97 | H5N9 |
| AF250495 | A/Duck/Hong Kong/P169/97 | H3N8 |
| AF250498 | A/Duck/Hong Kong/P54/97 | H11N9 |
| AF250499 | A/Duck/Hong Kong/T25/97 | H11N8 |
| AF250501 | A/Duck/Hong Kong/Y264/97 | H4N8 |
| AY633392 | A/teal/Alberta/16/97 | H2N9 |
| AF536736 | A/Chicken/Henan/98 | H9N2 |
| AJ410587 | A/duck/Hong Kong/324/98 | H6N2 |
| AY241629 | A/Chicken/NY/12273-11/99 | H7N3 |
| AF216726 | A/Environment/Hong Kong/437-8/99 | H5N1 |
| AJ427300 | A/aquatic bird/Hong Kong/399/99 | H3N8 |
| AY633352 | A/pintail/Alberta/207/99 | H4N8 |
| AY180647 | A/Bantam/Nanchang/9-366/2000 | H3N3 |
| AY180606 | A/duck/Nanchang/4-191/2000 | H4N6 |
| AF523502 | A/Duck/Shantou/2030/00 | H9N1 |
| AY180614 | A/Quail/Nanchang/4-034/2000 | H4N6 |
| AY180617 | Å/Quail/Nanchang/4-040/2000 | H9N2 |
| AY300986 | A/avain/NY/53726/00 | H5N2 |
| AY180620 | A/mallard/Alberta/127/00 | H3N8 |
| AY300999 | A/blue-winged teal/TX/2/01 | H7N3 |
| AF457675 | A/chicken/California/905/01 | H6N2 |
| AY259220 | A/chicken/Hebei/1/01 | H9N2 |
| AY180600 | A/chicken/Nanchang/3-201/01 | H3N6 |
| AY422029 | A/duck/Hokkaido/86/01 | H2N3 |
| AY241662 | A/Turkey/VA/67/02 | H7N2 |
| AY300998 | A/duck/NY/191255-59/02 | H5N8 |
| AY300995 | A/turkey/CA/D0208651-C/02 | H5N2 |
| AY303645 | A/chicken/Chile/4322/03 | H7N3 |
| AY342424 | A/chicken/Netherlands/1/03 | H7N7 |
| AY611528 | A/chicken/British Columbia/04 | H7N3 |
| AY609316 | A/chicken/Guangdong/174/04 | H5N1 |
| AY590580 | A/chicken/Nakorn-Patom/Thailand/CU-K2/2004 | H5N1 |

[0479] TABLE 19F
Influenza A virus NP transcripts (strains isolated from avians)

| | | |
|---|---|---|
| M63779 | A/FPV/Dobson/‘Dutch’/27 | H7N7 |
| AJ243993 | A/FPV/ROSTOCK/34 | H7N1 |
| M22576 | A/FPV/Rostock/34 | H7N1 |
| M21937 | A/FPV/Rostock/34 | H7N1 |
| M24660 | A/FPV/Rostock/34 (mutant ts19) | H7N1 |
| M24556 | A/FPV/Rostock/34 (revertant 19R) | H7N1 |
| M24557 | A/FPV/Rostock/34 (revertant 81R) | H7N1 |
| M24453 | A/Chicken/Germany/N/49 | H10N7 |
| M63773 | A/Duck/Manitoba/1/53 | H10N7 |
| M63780 | A/Duck/England/1/56 | H11N6 |
| M30762 | A/duck/Czechoslovakia/56 | H4N6 |
| M30763 | A/duck/Ukraine/2/60 | H11N8 |
| M30767 | A/Tern/South Africa/61 | H5N3 |
| M63781 | A/Duck/England/1/62 | H4N6 |
| AF156415 | A/Turkey/California/189/66 | H9N2 |
| M63774 | A/Turkey/Ontario/7732/66 | H5N9 |
| M63775 | A/Duck/Pennsylvania/1/69 | H6N1 |
| M27298 | A/shearwater/Australia/72 | H6N5 |
| M27519 | A/tern/Turkmenia/18/72 | H3N3 |
| M22344 | A/parrot/Ulster/73 | H7N1 |
| M63776 | A/Duck/Memphis/928/74 | H3N8 |
| M22573 | A/duck/Hong Kong/7/75 | H3N2 |
| M36812 | A/Anas acuta/Primorje/695/76 | H2N3 |
| AF523423 | A/Duck/Hong Kong/86/76 | H9N2 |
| U49093 | A/Goose/Hong Kong/8/76 | H1N1 |
| M30760 | A/duck/New Zealand/31/76 | H4N6 |
| U49097 | A/Duck/Hong Kong/193/77 | H1N2 |
| M63777 | A/Gull/Maryland/5/77 | H11N9 |
| M30765 | A/budgerigar/Hokkaido/1/77 | H4N6 |
| M22574 | A/duck/Bavaria/2/77 | H1N1 |
| M27521 | A/gull/Maryland/704/77 | H13N6 |
| M76603 | A/turkey/England/647/77 | H1N1 |
| M63782 | A/Duck/Beijing/1/78 | H3N6 |
| AF523421 | A/Duck/Hong Kong/289/78 | H9N2 |
| AF523424 | A/Duck/Hong Kong/366/78 | H9N2 |
| D00050 | A/Mallard/New York/6750/78 | H2N2 |
| M30755 | A/gull/Maryland/1824/78 | H13N9 |
| AF523422 | A/Duck/Hong Kong/552/79 | H9N2 |
| U49095 | A/Duck/Hong Kong/717/79 | H1N3 |
| M30761 | A/grey teal/Australia/2/79 | H4N4 |
| M30756 | A/gull/Maryland/1815/79 | H13N6 |
| M63783 | A/Duck/Australia/749/80 | H1N1 |
| AF079571 | A/Duck/Hokkaido/8/80 | H3N8 |
| M30752 | A/Gull/Massachussetts/26/80 | H13N6 |
| M30757 | A/Gull/Minnesota/945/80 | H13N6 |
| M63784 | A/Teal/Iceland/29/80 | H7N7 |
| M30769 | A/turkey/Minnesota/833/80 | H4N2 |
| M63778 | A/Turkey/Minnesota/1661/81 | H1N1 |
| M63785 | A/Mallard/Astrakhan(Gurjev)/263/82 | H14N5 |
| M30764 | A/mallard/Astrakhan/244/82 | H14 |
| M30768 | A/chicken/Pennsylvania/1/83 | H5N2 |
| AY633119 | A/mallard/Alberta/743/83 | H9N1 |
| M30753 | A/gull/Astrakhan/227/84 | H13N6 |
| AY633311 | A/mallard/Alberta/98/85 | H6N2 |
| AY633319 | A/pintail/Alberta/113/85 | H6N2 |
| M30766 | A/ruddy turnstone/New Jersey/47/85 | H4N6 |
| Z26855 | A/oystercatcher/Germany/87 | H1N1 |
| AY633279 | A/mallard/Alberta/321/88 | H9N2 |
| M76609 | A/turkey/North Carolina/1790/88 | H1N1 |
| AJ427301 | A/curlew sandpiper/Hong Kong/208/89 | H10N5 |
| AY633295 | A/mallard/Alberta/11/91 | H9N2 |
| AY633167 | A/mallard/Alberta/17/91 | H9N2 |
| Z26857 | A/turkey/Germany/3/91 | H1N1 |
| U49094 | A/Duck/Nanchang/1749/92 | H11N2 |
| AF156410 | A/Quail/Hong Kong/AF157/92 | H9N2 |
| AY633191 | A/mallard/Alberta/203/92 | H6N5 |
| AF156414 | A/Quail/Arkansas/29209-1/93 | H9N2 |
| AY633335 | A/pintail/Alberta/179/93 | H6N1 |
| AF156409 | A/Chicken/Beijing/1/94 | H9N2 |
| AY497120 | A/Chicken/Hidalgo/232/94 | H5N2 |
| AF098624 | A/Chicken/Hidalgo/26654-1368/94 | H5N2 |
| AF156408 | A/Chicken/Hong Kong/739/94 | H9N2 |
| AF098625 | A/Chicken/Mexico/26654-1374/94 | H5N2 |
| AY497113 | A/Chicken/Mexico/31381-7/94 | H5N2 |
| AF098627 | A/Chicken/Puebla/14585-622/94 | H5N2 |
| AY497114 | A/Chicken/Puebla/8623-607/94 | H5N2 |
| AF098626 | A/Chicken/Puebla/8623-607/94 | H5N2 |
| AY633383 | A/Redhead/Alberta/291/94 | H6N8 |
| AY633239 | A/mallard/Alberta/232/94 | H6N8 |
| AY633303 | A/mallard/Alberta/76/94 | H6N8 |
| AY633327 | A/pintail/Alberta/155/94 | H6N8 |
| AF536699 | A/Chicken/Beijing/1/95 | H9N2 |
| AF213906 | A/Chicken/Italy/24/95 | H1N1 |
| AY497117 | A/Chicken/Puebla/28159-474/95 | H5N2 |
| AF098628 | A/Chicken/Queretaro/14588-19/95 | H5N2 |
| AF508600 | A/Duck/Germany/113/95 | H9N2 |
| AF213905 | A/Mallard/Italy/24/95 | H1N1 |
| AF508596 | A/Ostrich/South Africa/9508103/95 | H9N2 |
| AB020778 | A/Chicken/Beijing/1/96 | H9N2 |
| AF536703 | A/Chicken/Hebei/1/96 | H9N2 |
| AF156412 | A/Chicken/Korea/25232-96006/96 | H9N2 |
| AF156411 | A/Chicken/Korea/38349-p96323/96 | H9N2 |
| AF203787 | A/Chicken/Korea/MS96/96 | H9N2 |
| AF508613 | A/Chicken/Shandong/6/96 | H9N2 |
| AF144303 | A/Goose/Guangdong/1/96 | H5N1 |
| AY633207 | A/Mallard/Alberta/206/96 | H6N8 |
| AF508617 | A/Quail/Shanghai/8/96 | H9N2 |
| AF156413 | A/Shorebird/Delaware/9/96 | H9N2 |
| AY633183 | A/mallard/Alberta/202/96 | H2N5 |
| AF536700 | A/Chicken/Beijing/2/97 | H9N2 |
| AF508607 | A/Chicken/Guangdong/11/97 | H9N2 |
| AF536702 | A/Chicken/Guangdong/97 | H9N2 |
| AF508609 | A/Chicken/Heilongjiang/10/97 | H9N2 |
| AF046084 | A/Chicken/Hong Kong/220/97 | H5N1 |
| AF098618 | A/Chicken/Hong Kong/728/97 | H5N1 |
| AF098619 | A/Chicken/Hong Kong/786/97 | H5N1 |
| AF098620 | A/Chicken/Hong Kong/915/97 | H5N1 |
| AF156403 | A/Chicken/Hong Kong/G23/97 | H9N2 |
| AF156402 | A/Chicken/Hong Kong/G9/97 | H9N2 |
| AF098617 | A/Chicken/Hong Kong/y388/97 | H5N1 |
| AF319644 | A/Chicken/Italy/312/97 | H5N2 |
| AF319645 | A/Chicken/Italy/330/97 | H5N2 |
| AF319646 | A/Chicken/Italy/367/97 | H5N2 |
| AF319647 | A/Chicken/Italy/9097/97 | H5N9 |
| AF508615 | A/Chicken/Shenzhen/9/97 | H9N2 |
| AF508612 | A/Chicken/Sichuan/5/97 | H9N2 |
| AF250473 | A/Duck/Hong Kong/P185/97 | H3N8 |
| AF250474 | A/Duck/Hong Kong/P54/97 | H11N9 |
| AF250470 | A/Duck/Hong Kong/T25/97 | H11N8 |
| AF250471 | A/Duck/Hong Kong/T37/97 | H11N8 |
| AF156405 | A/Duck/Hong Kong/Y280/97 | H9N2 |
| AF156406 | A/Duck/Hong Kong/Y439/97 | H9N2 |
| AF098621 | A/Duck/Hong Kong/p46/97 | H5N1 |
| AF098622 | A/Duck/Hong Kong/y283/97 | H5N1 |
| AF508616 | A/Duck/Nanjing/1/97 | H9N2 |
| ISDN22474 | A/Duck/Singapore/645/97 | H5N3 |
| AF370122 | A/Goose/Guangdong/3/97 | H5N1 |
| AF250475 | A/Goose/Hong Kong/W217/97 | H6N9 |
| AF098623 | A/Goose/Hong Kong/w355/97 | H5N1 |
| AF508603 | A/Pheasant/Ireland/PV18/97 | H9N2 |
| AF156404 | A/Pigeon/Hong Kong/Y233/97 | H9N2 |
| AF156407 | A/Quail/Hong Kong/G1/97 | H9N2 |
| AF250480 | A/Teal/Hong Kong/W312/97 | H6N1 |
| AF057293 | A/chicken/Hong Kong/258/97 | H5N1 |
| AY633135 | A/mallard/Alberta/117/97 | H3N8 |
| AB049161 | A/parakeet/Chiba/1/97 | H9N2 |
| AY633343 | A/pintail/Alberta/156/97 | H3N8 |
| AY633367 | A/pintail/Alberta/22/97 | H2N9 |
| AY633391 | A/teal/Alberta/16/97 | H2N9 |
| AF250472 | A/Aquatic bird/Hong Kong/M603/98 | H11N1 |
| AF508605 | A/Chicken/Beijing/8/98 | H9N2 |
| AF508599 | A/Chicken/Germany/R45/98 | H9N2 |
| AF536704 | A/Chicken/Hebei/2/98 | H9N2 |
| AF536705 | A/Chicken/Hebei/3/98 | H9N2 |
| AF508608 | A/Chicken/Hebei/4/98 | H9N2 |
| AF536706 | A/Chicken/Henan/98 | H9N2 |
| AY497116 | A/Chicken/Puebla/231-5284/98 | H5N2 |
| AF536708 | A/Chicken/Shandong/98 | H9N2 |
| AY253753 | A/Chicken/Shanghai/F/98 | H9N2 |
| AY497115 | A/chicken/Aguascalientes/124-3705/98 | H5N2 |
| AY633199 | A/mallard/Alberta/205/98 | H2N3 |
| AY633215 | A/mallard/Alberta/211/98 | H1N1 |
| AY633231 | A/mallard/Alberta/226/98 | H2N3 |
| AY633247 | A/mallard/Alberta/242/98 | H3N8 |
| AY633255 | A/mallard/Alberta/279/98 | H3N8 |
| AY633263 | A/mallard/Alberta/295/98 | H4N6 |
| AY633271 | A/mallard/Alberta/30/98 | H4N6 |
| AY633287 | A/mallard/Alberta/47/98 | H4N1 |
| AB049162 | A/parakeet/Narita/92A/98 | H9N2 |
| AF536701 | A/Chicken/Beijing/3/99 | H9N2 |
| AF222619 | A/Chicken/Hong Kong/FY20/99 | H9N2 |
| AF222620 | A/Chicken/Hong Kong/KC12/99 | H9N2 |
| AF222616 | A/Chicken/Hong Kong/NT16/99 | H9N2 |
| AF186272 | A/Chicken/Hong Kong/SF2/99 | H9N2 |
| AF508601 | A/Chicken/Iran/11T/99 | H9N2 |
| AF508604 | A/Chicken/Korea/99029/99 | H9N2 |
| AF536707 | A/Chicken/Liaoning/99 | H9N2 |
| AF508611 | A/Chicken/Ningxia/5/99 | H9N2 |
| AJ291394 | A/Chicken/Pakistan/2/99 | H9N2 |
| AF508597 | A/Chicken/Pakistan/4/99 | H9N2 |
| AF508598 | A/Chicken/Pakistan/5/99 | H9N2 |
| AF508602 | A/Chicken/Saudi Arabia/532/99 | H9N2 |
| AF508614 | A/Chicken/Shijiazhuang/2/99 | H9N2 |
| AF216736 | A/Environment/Hong Kong/437-10/99 | H5N1 |
| AF216712 | A/Environment/Hong Kong/437-4/99 | H5N1 |
| AF216720 | A/Environment/Hong Kong/437-6/99 | H5N1 |
| AF216728 | A/Environment/Hong Kong/437-8/99 | H5N1 |
| AF222618 | A/Pheasant/Hong Kong/SSP11/99 | H9N2 |
| AF222615 | A/Pigeon/Hong Kong/FY6/99 | H9N2 |
| AF222614 | A/Quail/Hong Kong/A17/99 | H9N2 |
| AF186270 | A/Quail/Hong Kong/NT28/99 | H9N2 |
| AF222617 | A/Quail/Hong Kong/SSP10/99 | H9N2 |
| AF186271 | A/Silky Chicken/Hong Kong/SF43/99 | H9N2 |
| AF222621 | A/Silky Chicken/Hong Kong/SF44/99 | H9N2 |
| AY038019 | A/Turkey/MO/24093/99 | H1N2 |
| AJ427298 | A/aquatic bird/Hong Kong/399/99 | H3N8 |
| AF261750 | A/chicken/Taiwan/7-5/99 | H6N1 |
| AY585429 | A/duck/Guangxi/07/1999 | H5N1 |
| AJ410555 | A/duck/Hong Kong/3096/99 | H6N2 |
| AJ410556 | A/duck/Hong Kong/3461/99 | H6N1 |
| AY633127 | A/mallard/Alberta/111/99 | H4N6 |
| AY633175 | A/mallard/Alberta/199/99 | H3N6 |
| AY633223 | A/mallard/Alberta/215/99 | H6N8 |
| AJ410548 | A/pheasant/Hong Kong/SH39/99 | H6N1 |
| AY633351 | A/pintail/Alberta/207/99 | H4N8 |
| AY633359 | A/pintail/Alberta/210/99 | H4N6 |
| AY633375 | A/pintail/Alberta/37/99 | H3N8 |
| AJ410549 | A/quail/Hong Kong/1721-20/99 | H6N1 |
| AJ410550 | A/quail/Hong Kong/1721-30/99 | H6N1 |
| AJ627488 | A/turkey/Italy/4603/1999 | H7N1 |
| AY180580 | A/Bantam/Nanchang/9-366/2000 | H3N3 |
| AF474069 | A/Chicken/California/650/00 | H6N2 |
| AF508606 | A/Chicken/Guangdong/10/00 | H9N2 |
| AF508610 | A/Chicken/Henan/62/00 | H9N2 |
| AY180581 | A/Chicken/Nanchang/1-0016/2000 | H9N2 |
| AY180545 | A/Chicken/Nanchang/12-220/2000 | H3N6 |
| AY180527 | A/Chicken/Nanchang/12-301/2000 | H3N6 |
| AY180554 | A/Chicken/Nanchang/2-0527/2000 | H4N6 |
| AY180539 | A/Chicken/Nanchang/3-0128/2000 | H4N6 |
| AY180531 | A/Chicken/Nanchang/4-008/2000 | H4N6 |
| AY180562 | A/Chicken/Nanchang/4-010/2000 | H9N2 |
| AY180529 | A/Chicken/Nanchang/7-010/2000 | H3N6 |
| AY180535 | A/Chicken/Nanchang/9-220/2000 | H3N6 |
| AY059497 | A/Duck/Hong Kong/2986.1/2000 | H5N1 |
| AY059494 | A/Duck/Hong Kong/ww381/2000 | H5N1 |
| AY059495 | A/Duck/Hong Kong/ww461/2000 | H5N1 |
| AY180584 | A/Duck/Nanchang/1-0070/2000 | H9N2 |
| AY180549 | A/Duck/Nanchang/10-096/2000 | H3N6 |
| AY180553 | A/Duck/Nanchang/10-383/2000 | H3N6 |
| AY180583 | A/Duck/Nanchang/10-389/2000 | H9N2 |
| AY180542 | A/Duck/Nanchang/11-197/2000 | H9N2 |
| AY180544 | A/Duck/Nanchang/11-290/2000 | H9N2 |
| AY180537 | A/Duck/Nanchang/11-392/2000 | H9N2 |
| AY180586 | A/Duck/Nanchang/12-280/2000 | H3N6 |
| AY180524 | A/Duck/Nanchang/2-0147/2000 | H4N6 |
| AY180557 | A/Duck/Nanchang/2-0485/2000 | H2N9 |
| AY180558 | A/Duck/Nanchang/2-0486/2000 | H2N9 |
| AY180573 | A/Duck/Nanchang/2-0492/2000 | H2N9 |
| AY180574 | A/Duck/Nanchang/3-090/2000 | H2N9 |
| AY180572 | A/Duck/Nanchang/4-165/2000 | H4N6 |
| AY180559 | A/Duck/Nanchang/4-173/2000 | H4N6 |
| AY180568 | A/Duck/Nanchang/4-184/2000 | H2N9 |
| AY180571 | A/Duck/Nanchang/4-190/2000 | H2N9 |
| AY180570 | A/Duck/Nanchang/4-191/2000 | H4N6 |
| AY180534 | A/Duck/Nanchang/7-092/2000 | H9N2 |
| AY180547 | A/Duck/Nanchang/8-174/2000 | H3N6 |
| AY180546 | A/Duck/Nanchang/8-197/2000 | H3N6 |
| AY180532 | A/Duck/Nanchang/8-198/2000 | H3N6 |
| AY180526 | A/Duck/Nanchang/9-091/2000 | H3N6 |
| AY180579 | A/Duck/Nanchang/9-385/2000 | H3N6 |
| AF523413 | A/Duck/Shantou/1042/00 | H9N2 |
| AF523410 | A/Duck/Shantou/1043/00 | H9N2 |
| AF523425 | A/Duck/Shantou/1588/00 | H9N1 |
| AF523420 | A/Duck/Shantou/1881/00 | H9N2 |
| AF523426 | A/Duck/Shantou/2030/00 | H9N1 |
| AF523415 | A/Duck/Shantou/2102/00 | H9N2 |
| AF523411 | A/Duck/Shantou/2134/00 | H9N2 |
| AF523419 | A/Duck/Shantou/2143/00 | H9N2 |
| AF523417 | A/Duck/Shantou/2144/00 | H9N2 |
| AF523416 | A/Duck/Shantou/830/00 | H9N2 |
| AY059498 | A/Goose/Hong Kong/3014.8/2000 | H5N1 |
| AF398419 | A/Goose/Hong Kong/385.3/2000 | H5N1 |
| AF398420 | A/Goose/Hong Kong/385.5/2000 | H5N1 |
| AY059492 | A/Goose/Hong Kong/ww26/2000 | H5N1 |
| AY059493 | A/Goose/Hong Kong/ww28/2000 | H5N1 |
| AY059496 | A/Goose/Hong Kong/ww491/2000 | H5N1 |
| AY180530 | A/Pigeon/Nanchang/11-045/2000 | H3N6 |
| AY180538 | A/Pigeon/Nanchang/11-145/2000 | H9N2 |
| AY180525 | A/Pigeon/Nanchang/2-0461/2000 | H9N2 |
| AY180560 | A/Pigeon/Nanchang/7-058/2000 | H9N2 |
| AY180536 | A/Pigeon/Nanchang/8-142/2000 | H3N6 |
| AY180582 | A/Pigeon/Nanchang/9-058/2000 | H3N3 |
| AY180550 | A/Quail/Nanchang/10-028/2000 | H3N6 |
| AY180543 | A/Quail/Nanchang/12-340/2000 | H1N1 |
| AY180575 | A/Quail/Nanchang/2-0460/2000 | H9N2 |
| AY180576 | A/Quail/Nanchang/2-0579/2000 | H4N6 |
| AY180540 | A/Quail/Nanchang/4-026/2000 | H4N6 |
| AY180541 | A/Quail/Nanchang/4-034/2000 | H4N6 |
| AY180563 | A/Quail/Nanchang/4-040/2000 | H9N2 |
| AY180548 | A/Quail/Nanchang/7-026/2000 | H3N6 |
| AY180564 | A/Wild Duck/Nanchang/2-0480/2000 | H9N2 |
| AF457701 | A/chicken/California/431/00 | H6N2 |
| AF457693 | A/chicken/California/465/00 | H6N2 |
| AY496851 | A/chicken/Mudanjiang/0823/2000 | H9N2 |
| AJ410554 | A/chukka/Hong Kong/FY295/00 | H6N1 |
| AJ410553 | A/chukka/Hong Kong/NT261/00 | H6N1 |
| AY585423 | A/duck/Fujian/19/2000 | H5N1 |
| AY585425 | A/duck/Guangdong/07/2000 | H5N1 |
| AY585426 | A/duck/Guangdong/12/2000 | H5N1 |
| AY585428 | A/duck/Guangdong/40/2000 | H5N1 |
| AY585439 | A/duck/Zhejiang/11/2000 | H5N1 |
| AY585440 | A/duck/Zhejiang/52/2000 | H5N1 |
| AY633143 | A/mallard/Alberta/119/00 | H4N6 |
| AY633151 | A/mallard/Alberta/127/00 | H3N8 |
| AY633159 | A/mallard/Alberta/136/00 | H4N6 |
| AJ421064 | A/pheasant/Hong Kong/FY294/00 | H6N1 |
| AJ427309 | A/pheasant/Hong Kong/FY294/00 | H6N1 |
| AJ427864 | A/quail/Hong Kong/FY298/00 | H6N1 |
| AJ410551 | A/quail/Hong Kong/SF550/00 | H6N1 |
| AJ410552 | A/quail/Hong Kong/SF595/00 | H6N1 |
| AF474070 | A/Chicken/California/139/01 | H6N2 |
| AY497118 | A/Chicken/El Salvador/102711-1/01 | H5N2 |
| AF509126 | A/Chicken/Hong Kong/715.5/01 | H5N1 |
| AF509127 | A/Chicken/Hong Kong/751.1/01 | H5N1 |
| AF509128 | A/Chicken/Hong Kong/822.1/01 | H5N1 |
| AF509129 | A/Chicken/Hong Kong/829.2/01 | H5N1 |
| AF509130 | A/Chicken/Hong Kong/830.2/01 | H5N1 |
| AF509131 | A/Chicken/Hong Kong/858.3/01 | H5N1 |
| AF509132 | A/Chicken/Hong Kong/866.3/01 | H5N1 |
| AF509133 | A/Chicken/Hong Kong/867.1/01 | H5N1 |
| AF509135 | A/Chicken/Hong Kong/873.3/01 | H5N1 |
| AF509136 | A/Chicken/Hong Kong/876.1/01 | H5N1 |
| AF509134 | A/Chicken/Hong Kong/879.1/01 | H5N1 |
| AF509137 | A/Chicken/Hong Kong/891.1/01 | H5N1 |
| AF509138 | A/Chicken/Hong Kong/893.2/01 | H5N1 |
| AF509120 | A/Chicken/Hong Kong/FY150/01 | H5N1 |
| AY221551 | A/Chicken/Hong Kong/FY150/01 | H5N1 |
| AY221550 | A/Chicken/Hong Kong/FY150/01- | H5N1 |
| AF509117 | A/Chicken/Hong Kong/FY77/01 | H5N1 |
| AY221549 | A/Chicken/Hong Kong/NT873.3/01 | H5N1 |
| AY221548 | A/Chicken/Hong Kong/NT873.3/01- | H5N1 |
| AF509125 | A/Chicken/Hong Kong/SF219/01 | H5N1 |
| AY221556 | A/Chicken/Hong Kong/YU562/01 | H5N1 |
| AF509118 | A/Chicken/Hong Kong/YU562/01 | H5N1 |
| AF509119 | A/Chicken/Hong Kong/YU563/01 | H5N1 |
| AY221555 | A/Chicken/Hong Kong/YU822.2/01 | H5N1 |
| AY221554 | A/Chicken/Hong Kong/YU822.2/01- | H5N1 |
| AY180585 | A/Chicken/Nanchang/1-020/2001 | H3N6 |
| AY180565 | A/Chicken/Nanchang/1-101/2001 | H3N6 |
| AY180533 | A/Chicken/Nanchang/2-120/2001 | H3N6 |
| AY180566 | A/Chicken/Nanchang/2-220/2001 | H3N6 |
| AY180555 | A/Chicken/Nanchang/3-120/2001 | H3N2 |
| AY180578 | A/Chicken/Nanchang/4-301/2001 | H9N2 |
| AY180551 | A/Chicken/Nanchang/4-361/2001 | H9N2 |
| AF468842 | A/Duck/Anyang/AVL-1/2001 | H5N1 |
| AF509141 | A/Duck/Hong Kong/573.4/01 | H5N1 |
| AF509142 | A/Duck/Hong Kong/646.3/01 | H5N1 |
| AY233394 | A/Duck/NC/91347/01 | H1N2 |
| AY180577 | A/Duck/Nanchang/1-100/2001 | H3N6 |
| AY180528 | A/Duck/Nanchang/1-161/2001 | H3N6 |
| AY180552 | A/Duck/Nanchang/1-181/2001 | H3N6 |
| AY180556 | A/Duck/Nanchang/2-182/2001 | H3N6 |
| AF523414 | A/Duck/Shantou/1605/01 | H9N2 |
| AF523418 | A/Duck/Shantou/2088/01 | H9N2 |
| AF509139 | A/Goose/Hong Kong/76.1/01 | H5N1 |
| AF509140 | A/Goose/Hong Kong/ww100/01 | H5N1 |
| AF509121 | A/Pheasant/Hong Kong/FY155/01 | H5N1 |
| AY221553 | A/Pheasant/Hong Kong/FY155/01 | H5N1 |
| AY221552 | A/Pheasant/Hong Kong/FY155/01- | H5N1 |
| AF509124 | A/Pigeon/Hong Kong/SF215/01 | H5N1 |
| AF509123 | A/Quail/Hong Kong/SF203/01 | H5N1 |
| AY180569 | A/Quail/Nanchang/2-040/2001 | H3N6 |
| AY180567 | A/Quail/Nanchang/3-140/2001 | H3N6 |
| AF509122 | A/Silky Chicken/Hong Kong/SF189/01 | H5N1 |
| AF523412 | A/Wild Duck/Shantou/4808/01 | H9N2 |
| AF457709 | A/chicken/California/139/01 | H6N2 |
| AF457685 | A/chicken/California/6643/01 | H6N2 |
| AF457676 | A/chicken/California/905/01 | H6N2 |
| AY180561 | A/chicken/Nanchang/3-201/01 | H3N6 |
| AY268949 | A/chicken/Wangcheng/4/2001 | H9N2 |
| AY585422 | A/duck/Fujian/17/2001 | H5N1 |
| AY585424 | A/duck/Guangdong/01/2001 | H5N1 |
| AY585430 | A/duck/Guangxi/22/2001 | H5N1 |
| AY585431 | A/duck/Guangxi/35/2001 | H5N1 |
| AY585432 | A/duck/Guangxi/50/2001 | H5N1 |
| AY422023 | A/duck/Hokkaido/107/01 | H2N3 |
| AY422024 | A/duck/Hokkaido/17/01 | H2N3 |
| AY422025 | A/duck/Hokkaido/86/01 | H2N3 |
| AY422026 | A/duck/Hokkaido/95/01 | H2N2 |
| AY585434 | A/duck/Shanghai/08/2001 | H5N1 |
| AY585435 | A/duck/Shanghai/13/2001 | H5N1 |
| AY585438 | A/duck/Shanghai/38/2001 | H5N1 |
| AY586423 | A/mallard/Italy/33/01 | H7N3 |
| AY586424 | A/mallard/Italy/43/01 | H7N3 |
| AY497119 | A/Chicken/Guatemala/194573/02 | H5N2 |
| AY651511 | A/Ck/HK/31.2/2002 | H5N1 |
| AY651522 | A/Ck/HK/3169.1/2002 | H5N1 |
| AY651521 | A/Ck/HK/3176.3/2002 | H5N1 |
| AY651512 | A/Ck/HK/37.4/2002 | H5N1 |
| AY651514 | A/Ck/HK/YU22/2002 | H5N1 |
| AY575908 | A/Eg/Hong Kong/757.3/02 | H5N1 |
| AY575909 | A/G.H/Hong Kong/793.1/02 | H5N1 |
| AY651510 | A/Gf/HK/38/2002 | H5N1 |
| AY651513 | A/SCk/HK/YU100/2002 | H5N1 |
| AY303658 | A/chicken/Chile/176822/02 | H7N3 |
| AY303659 | A/chicken/Chile/4957/02 | H7N3 |
| AY575911 | A/chicken/Hong Kong/31.4/02 | H5N1 |
| AY575915 | A/chicken/Hong Kong/409.1/02 | H5N1 |
| AY575912 | A/chicken/Hong Kong/61.9/02 | H5N1 |
| AY575914 | A/chicken/Hong Kong/96.1/02 | H5N1 |
| AY575913 | A/chicken/Hong Kong/YU777/02 | H5N1 |
| AY585420 | A/duck/Fujian/01/2002 | H5N1 |
| AY585421 | A/duck/Fujian/13/2002 | H5N1 |
| AY585427 | A/duck/Guangdong/22/2002 | H5N1 |
| AY585433 | A/duck/Guangxi/53/2002 | H5N1 |
| AY575910 | A/duck/Hong Kong/821/02 | H5N1 |
| AY585436 | A/duck/Shanghai/35/2002 | H5N1 |
| AY585437 | A/duck/Shanghai/37/2002 | H5N1 |
| AY651524 | A/feral pigeon/HK/862.7/2002 | H5N1 |
| AY575907 | A/goose/Hong Kong/739.2/02 | H5N1 |
| AY651526 | A/grey heron/HK/861.1/2002 | H5N1 |
| AY575916 | A/pheasant/Hong Kong/sv674.15/02 | H5N1 |
| AY651527 | A/teal/China/2978.1/2002 | H5N1 |
| AY651525 | A/tree sparrow/HK/864/2002 | H5N1 |
| AY586426 | A/turkey/Italy/214845/02 | H7N3 |
| AJ627486 | A/turkey/Italy/214845/2002 | H7N3 |
| AJ627495 | A/turkey/Italy/220158/2002 | H7N3 |
| AY586425 | A/turkey/Italy/220158/2002 | H7N3 |
| AY651515 | A/Ck/HK/2133.1/2003 | H5N1 |
| AY651519 | A/Ck/HK/FY157/2003 | H5N1 |
| AY651516 | A/Ck/HK/NT93/2003 | H5N1 |
| AY651517 | A/Ck/HK/SSP141/2003 | H5N1 |
| AY651518 | A/Ck/HK/WF157/2003 | H5N1 |
| AY651520 | A/Ck/HK/YU324/2003 | H5N1 |
| AY651490 | A/Ck/Indonesia/2A/2003 | H5N1 |
| AY651485 | A/Ck/Indonesia/BL/2003 | H5N1 |
| AY651487 | A/Ck/Indonesia/PA/2003 | H5N1 |
| AY651532 | A/Ck/ST/4231/2003 | H5N1 |
| AY651529 | A/Dk/HN/5806/2003 | H5N1 |
| AY651534 | A/Dk/ST/4003/2003 | H5N1 |
| AY651535 | A/Dk/YN/6255/2003 | H5N1 |
| AY651536 | A/Dk/YN/6445/2003 | H5N1 |
| AY342426 | A/avian/Netherlands/033/03 | H7N7 |
| AY342425 | A/avian/Netherlands/219/03 | H7N7 |
| AY651523 | A/black headed gull/HK/12.1/2003 | H5N1 |
| AJ620352 | A/chicken/Germany/R28/03 | H7N7 |
| AY342427 | A/chicken/Netherlands/1/03 | H7N7 |
| AY518364 | A/duck/China/E319-2/03 | H5N1 |
| AY576929 | A/Chicken/Vietnam/CM/2004 | H5N1 |
| AY651488 | A/Ck/Indonesia/4/2004 | H5N1 |
| AY651489 | A/Ck/Indonesia/5/2004 | H5N1 |
| AY651491 | A/Ck/Thailand/1/2004 | H5N1 |
| AY651492 | A/Ck/Thailand/73/2004 | H5N1 |
| AY651493 | A/Ck/Thailand/9.1/2004 | H5N1 |
| AY651502 | A/Ck/Viet Nam/33/2004 | H5N1 |
| AY651503 | A/Ck/Viet Nam/35/2004 | H5N1 |
| AY651504 | A/Ck/Viet Nam/36/2004 | H5N1 |
| AY651505 | A/Ck/Viet Nam/37/2004 | H5N1 |
| AY651506 | A/Ck/Viet Nam/38/2004 | H5N1 |
| AY651507 | A/Ck/Viet Nam/39/2004 | H5N1 |
| AY651508 | A/Ck/Viet Nam/C57/2004 | H5N1 |
| AY651538 | A/Ck/YN/115/2004 | H5N1 |
| AY651537 | A/Ck/YN/374/2004 | H5N1 |
| AY651531 | A/Dk/HN/101/2004 | H5N1 |
| AY651530 | A/Dk/HN/303/2004 | H5N1 |
| AY651486 | A/Dk/Indonesia/MS/2004 | H5N1 |
| AY651496 | A/Dk/Thailand/71.1/2004 | H5N1 |
| AY651509 | A/Dk/Viet Nam/11/2004 | H5N1 |
| AY650273 | A/GSC_chicken/British Columbia/04 | H7N3 |
| AY648290 | A/GSC_chicken_B/British Columbia/04 | H7N3 |
| AY651497 | A/Gs/Thailand/79/2004 | H5N1 |
| AY651533 | A/Ph/ST/44/2004 | H5N1 |
| AY651494 | A/Qa/Thailand/57/2004 | H5N1 |
| AY651495 | A/bird/Thailand/3.1/2004 | H5N1 |
| AY611527 | A/chicken/British Columbia/04 | H7N3 |
| AY646081 | A/chicken/British Columbia/GSC_human_B/04 | H7N3 |
| AY609313 | A/chicken/Guangdong/174/04 | H5N1 |
| AY684707 | A/chicken/Hubei/327/2004 | H5N1 |
| AY653196 | A/chicken/Jilin/9/2004 | H5N1 |
| AY590579 | A/chicken/Nakorn-Patom/Thailand/CU-K2/2004 | H5N1 |
| AY574189 | A/chicken/Vietnam/HD1/2004 | H5N1 |
| AY574192 | A/chicken/Vietnam/HD2/2004 | H5N1 |
| AY576931 | A/muscovy duck/Vietnam/MdGL/2004 | H5N1 |
| AY651528 | A/peregrine falcon/HK/D0028/2004 | H5N1 |

### Example 18

### High Throughput Screen to Identify Highly Effective siRNAs

[0480] Cell Culture. Human lung epithelial cells A-549 (ATCC) were grown in DMEM medium containing 10% heat inactivated fetal calf serum (FCS), 2 mM L-glutamine, 100 units/ml penicillin and 100 ug/ml streptomycin. Other cell lines derived from the airway such as Calu-3 or HBE cells (ATCC), or other cell lines, could also be used. Cells were grown at 37° C. in a humidified incubator with 5% CO₂.

[0481] siRNAs. Various siRNAs each containing an antisense strand with a 19 nucleotide inhibitory region perfectly complementary to a highly conserved target portion listed in Table 16 and a sense strand complementary to the antisense strand were designed and synthesized. The siRNAs contained a 3′ dTdT overhang on both strands. All siRNAs were synthesized by Dharmacon Research (Lafayette, Colo.) using 2′ACE protection chemistry. The siRNAs were deprotected, desalted, and annealed by the manufacturer.

[0482] Dual luciferase assay to identify highly effective siRNAs. Full length cDNAs corresponding to the relevant influenza virus transcript, i.e., from NP, PA, PB1, PB2, M, NS, NA or HA gene from PR8 virus were cloned into the psiCHECK™-2 vector (Cat. No. C8021, Promega, Madison, Wis.) according to the directions of the manufacturer (see Promega Technical Bulletin No. 329, available at www.promega.com/tbs/tb329/tb329.pdf. The cDNAs were inserted into the 3′ UTR of a synthetic Renilla luciferase gene (hLuc) optimized for expression in mammalian cells. The DNA and siRNA targeted to the cDNA insert (or nonspecific sicontrol, Dharmacon) were co-transfected into A-549 cells using Lipofectamine 2000 (Invitrogen) according to the manufacturer's instructions. Following transfection, a fusion of the Renilla gene and the influenza virus gene was transcribed. Luciferase activity was measured as a function of the amount of each siRNA 24 hours after transfection. In this assay, RNAi mediated by the siRNA or shRNA hybridizing to the targeted portion of the fusion transcript (i.e., the influenza-specific portion of the fusion transcript) causes in degradation of the fused Renilla:influenza virus gene trancript resulting in a decreased luciferase signal. Firefly luciferase expressed from the same vector was used as a transfection control and specificity control as described in Promega Technical Bulletin 329. Specifically, 24 hrs after transfection, the lyse and substrate buffer (Dual-Glo Luciferase Assay System) were added to cells, and luciferase activity was read. 10 min later, Stop and Glo for Renilla was added and Renilla luciferase activity was read. Triplicates of each sample were done. The firefly luciferase activity from each well was used as transfection control for renilla in the same well. The ratio of Renilla/firefly luciferase activities was used as the final value of luciferase activity from each well. The average of the ratio from influenza siRNA triplicates was compared to that of sicontrol triplicates. Silencing % was computed as 100×(1−influenzasiRNA/sicontrol).

[0483] Table 26 presents data for a number of highly effective siRNAs identified in the screen. The table lists target gene (NP, PA, PB1, PB2), siRNA concentration, and ID numbers of the siRNA. Average silencing % at each concentration tested is listed under the siRNA ID. Blank spaces indicate experiment not done. The results indicate that a number of siRNAs silenced transcript expression by at least 80% even at concentrations as low as 0.6 nM.

TABLE 26
siRNA ID
Target gene: NP

| Average | | | | | | | |
|---|---|---|---|---|---|---|---|
| Silencing(%) | Conc. (nM) | 154 | 758 | 1121 | 1313 | NP-1496 | 1499 |
| | 0.0048 | 9.32 | 0 | 10.88 | 11.72 | | |
| | 0.024 | 48.2 | 10.56 | 34.72 | 46.93 | | |
| | 0.12 | 65.71 | 35.25 | 66.54 | 75.28 | 29.23 | 12.08 |
| | 0.6 | 84.37 | 66.76 | 84.75 | 87.43 | 68.62 | 66.13 |
| | 3 | 90.09 | 71.96 | 89.08 | 91.05 | 84.74 | 78.99 |
| | 15 | 90.46 | 74.21 | 89.13 | 91.67 | 90.41 | 84.71 |
| | 75 | 90.03 | 69.94 | 86.96 | 89.82 | 90.96 | 85.97 |

Target gene: PA

| Average | | | | | |
|---|---|---|---|---|---|
| Silencing(%) | Conc. (nM) | 7736 | 7803 | 8282 | 8286 |
| | 0.0048 | 11.4 | 27.27 | 11.94 | 11.62 |
| | 0.024 | 29.3 | 44.88 | 18.78 | 37.57 |
| | 0.12 | 60.14 | 77.37 | 40.34 | 69.03 |
| | 0.6 | 78.25 | 85.13 | 85.95 | 83.23 |
| | 3 | 85.76 | 86.78 | 92.18 | 89 |
| | 15 | 85.74 | 87.82 | 93.34 | 89.8 |
| | 75 | 85.42 | 86 | | 90.64 |

Target gene: PB1

| Average | | | | | | | PB1- |
|---|---|---|---|---|---|---|---|
| Silencing(%) | Conc. (nM) | 4276 | 5018 | 5457 | 5773 | 6124 | 2257 |
| | 0.0048 | | 0 | 9.11 | 0 | 8.4 | 13.7 |
| | 0.024 | | 22.98 | 23.92 | 22.21 | 27.03 | 34.2 |
| | 0.12 | 4.61 | 72.99 | 60.67 | 53.46 | 57.67 | 66.32 |
| | 0.6 | 60.81 | 85.83 | 82.63 | 75.09 | 76.65 | 81.29 |
| | 3 | 87.98 | 89.12 | 87.63 | 84.76 | 80.84 | 84.88 |
| | 15 | 92.17 | 89.07 | 89.81 | 84.94 | 83.93 | 86.05 |
| | 75 | 92.07 | 93.4 | 88.57 | 87.56 | | 82.29 |

Target gene: PB2

| Average | | | | | | PB2- |
|---|---|---|---|---|---|---|
| Silencing(%) | Conc. (nM) | 2327 | 3276 | 3807 | 3817 | 2240 |
| | 0.0048 | 7.79 | 0 | 0 | 14.51 | 5.76 |
| | 0.024 | 51.49 | 30.49 | 17.15 | 45.26 | 35.44 |
| | 0.12 | 81.92 | 66.53 | 42.36 | 73.04 | 55.83 |
| | 0.6 | 88.79 | 82.09 | 70.44 | 80.35 | 77.48 |
| | 3 | 90.84 | 87.19 | 79.65 | 83.76 | 80.66 |
| | 15 | 90.82 | 87.04 | 85.08 | 83.53 | 82.65 |
| | 75 | 90.95 | 88.39 | 83.26 | 82.06 | 85.19 |

[0484] Certain of the siRNAs and/or shRNAs that were identified as highly effective using the above screen were further tested against influenza virus in tissue culture as described in Example 19 and/or animal models, as described elsewhere herein.

### Example 19

### Screens to Identify Highly Effective siRNAs that Inhibit Viral Replication

[0485] Cell Culture. Vero cells (ATCC) were grown in DMEM medium containing 10% heat inactivated fetal calf serum (FCS), 2 mM L-glutamine, 100 units/ml penicillin and 100 ug/ml streptomycin. Cells are grown at 37° C. in a humidified incubator with 5% CO₂. Virus infections were done in DMEM containing 0.3% bovine serum albumin (BSA, Sigma, St. Louis, Mo.), 10 mM HEPES, 100 units/ml penicillin, and 100 μg/ml streptomycin.

[0486] siRNAs. siRNAs containing an antisense strand with a 19 nucleotide inhibitory region perfectly complementary to each of the highly conserved target portions listed in Table 18 and a sense strand complementary to the antisense strand were designed and synthesized. The siRNAs contained a 3′ dTdT overhang on both strands. All siRNAs were synthesized by Dharmacon Research (Lafayette, Colo.) using 2′ACE protection chemistry. The siRNAs were deprotected, desalted and annealed by the manufacturer.

[0487] siRNA transfection. Log-phase cultures of Vero cells were trypsinized, washed and seeded in 96-well plates at 20,000 cells per well and incubated at 37° C. in a humidified incubator with 5% CO₂ overnight. For the first screen, 10 pmol of siRNA (19 bp duplex region with dTdT 3′ overhang) was added to 25 μl of Opti-MEM I (Invitrogen). 0.75 μl of Lipofectamine 2000 (Invitrogen) and 0.19 μl of SuperRNAsin (Ambion) were diluted in 25 μl of Opti-MEM I and mixed gently. Diluted lipid was combined with the diluted siRNA (total volume is 50 μl) and the mixture was incubated for 20 min at room temperature to allow the siRNA-Lipofectamine 2000 complexes to form. At the end of incubation, 50 μl of transfection complex were pipetted into each well containing cells and 50 μl DMEM medium containing 10% FCS. Final concentration of each siRNA was 100 nM. Each siRNA was tested in triplicate, and results were averaged. NP-1496 (100 nM) and sicontrol (Dharmacon) served as positive and negative controls, respectively. siRNA transfection was performed in the same way for the second screen except that a concentration of 1 nM siRNA was used.

[0488] Viral Infection. After incubation at 37° C. in a humidified incubator with 5% CO₂ for 6 hours, the supernatant was removed and the cells in each well were infected with PR8 virus in 25 μl of PBS containing 0.3% BSA. Infection was performed at an MOI of 0.1 for the first and second screens. The plates were rocked gently at room temperature for 1 h before 175 μl of DMEM containing 0.3% BSA, 4 μg trypsin, 10 mM HEPES was added to each well. The plates were then incubated at 37° C. in a humidified incubator with 5% CO₂.

[0489] Measurement of Viral Titer. Supernatants were harvested at 24 hours after infection. Viral titer was measured as described above.

[0490] Results

[0491] In order to identify those siRNAs with higher activity from among a set of 215 selected siRNAs targeted to highly conserved target portions of the influenza genome, we performed a series of high throughput screens (HTS). Rather than directly testing whether the siRNA can suppress expression of its specific target gene, we decided to focus on evaluating the capability of the siRNAs to inhibit influenza virus production in the cells. Therefore, we used the virus titer as the readout, while recognizing that certain siRNAs which cannot reduce the virus titer significantly may still possess the capability to degrade target mRNAs and are thus of use for certain purposes.

[0492] Among the 215 siRNAs tested in the first HTS, 90 showed at least a 4-fold decrease in PR8 virus titer in Vero cell culture relative to either no treatment (NT) or the sicontrol. No non-specific inhibition was seen when vero cells were transfected with 100 nM of sicontrol. The transfection efficiency was about 80%. Results are summarized in Table 21 and are expressed in terms of fold inhibition of virus titer. The actual extent of inhibition is likely to be greater than presented in the table.

TABLE 21
Results of High Throughput Screen #1

| Virus Titer | |
|---|---|
| Inhibition | |
| (fold) | siRNA ID |
| >8 | 752, 754, 758, 1121, 1122, 1223, 1225, |
| | 1254, 1313, 1316, 1381, 1383, |
| | 1488, 1499, 1527, NP1496 |
| ≧4 | 109, 119, 154, 222, 224, 301, 302, |
| | 359, 375, 688, 692, 1490, 1568, |
| | 1714, 1720, 1728, 2054, 2283, |
| | 2327, 3225, 3231, 3276, 3277, 3693, |
| | 3700, 3880, 3882, 3887, 4120, |
| | 4163, 4276, 4283, 4913, 4915, 4980, |
| | 5018, 5359, 5360, 5457, 5460, |
| | 5574, 5578, 5580, 5584, 5680, 5773, |
| | 5791, 5793, 5795, 5902, 5942, |
| | 5945, 5947, 5997, 6081, 6087, 6089, |
| | 6351, 6436, 6559, 6696, 6732, |
| | 6744, 7202, 7424, 75177580, 7581, |
| | 7648, 7736, 7803, 7807, 8172, |
| | 8271, 8282, 8285, 8286, 8289, 8299, |
| | 8300, 8709, 9331 |

[0493] We performed a second high throughput screen using a lower concentration of siRNA (1 nM) to more accurately identify the highly effective siRNAs from among those that showed at least a 4-fold decrease in virus titer in the first HTS. Thirty siRNAs showed around a 3- to 4-fold decrease in PR8 virus titer in Vero cell culture when tested at this lower concentration. Results of the second HTS are presented in Table 22.

TABLE 22
Results of High Throughput Screen #2

| siRNA ID | Average |
|---|---|
| 109 | 2 |
| 119 | 1.67 |
| 154 | 1 |
| 222 | 2 |
| 224 | 1.67 |
| 301 | 1.67 |
| 302 | 1.67 |
| 359 | 2 |
| 375 | 1.67 |
| 688 | 1.67 |
| 692 | 2.67 |
| 752 | 2 |
| 754 | 1.67 |
| 758 | 1.33 |
| 1121 | 1 |
| sicontrol | 4 |
| 1122 | 1 |
| 1223 | 1.67 |
| 1225 | 1.33 |
| 1254 | 1.33 |
| 1313 | 1 |
| 1316 | 1 |
| 1381 | 2 |
| 1383 | 1.67 |
| 1488 | 1.67 |
| 1499 | 1.67 |
| 1527 | 1.67 |
| 1590 | 2 |
| 1714 | 1.67 |
| 2283 | 1.67 |
| 2327 | 1.33 |
| NT | 4 |
| 3276 | 1.33 |
| 3277 | 1.67 |
| 3693 | 4 |
| 3700 | 3.33 |
| 3880 | 4 |
| 3882 | 2 |
| 3887 | 2 |
| 4120 | 2 |
| 4163 | 2 |
| 4276 | 1 |
| 4283 | 1.33 |
| 4913 | 2 |
| 4915 | 1.33 |
| 4980 | 2 |
| 5018 | 1.33 |
| 5359 | 1.67 |
| 5360 | 1.67 |
| 5457 | 1.33 |
| 5460 | 1.33 |
| 5574 | 1.67 |
| 5578 | 1.67 |
| 5580 | 1.67 |
| 5584 | 1 |
| 5680 | 3.33 |
| 5773 | 1 |
| 5791 | 2 |
| 5793 | 1.67 |
| 5795 | 2.67 |
| 5902 | 2 |
| 5942 | 2.67 |
| 5945 | 2 |
| 5947 | 1.67 |
| 5997 | 1.67 |
| 6081 | 1.33 |
| 6087 | 1.33 |
| 6089 | 1.33 |
| 6351 | 1.67 |
| 6436 | 2 |
| 6559 | 2 |
| 6696 | 1.67 |
| 6732 | 1.67 |
| 6744 | 1.67 |
| 7202 | 1.67 |
| 7424 | 4 |
| 7517 | 1.67 |
| 7580 | 1.33 |
| 7581 | 1.33 |
| 7648 | 1 |
| 7736 | 1.67 |
| 7803 | 1 |
| 7807 | 1.67 |
| 8172 | 1.33 |
| 8271 | 3.33 |
| 8282 | 1 |
| 8285 | 4 |
| 8286 | 1 |
| 8289 | 1 |
| 8299 | 4 |
| 8300 | 1.67 |
| 9331 | 4 |
| sicontrol | 4 |
| NT | 4 |

### Example 20

### Confirmatory siRNA Screen

[0494] Materials and Methods

[0495] Thirty siRNAs selected from the second HTS and some siRNAs from the first HTS were tested in MDCK cells to confirm the results. 10 million MDCK cells in serum-free RPMI 1640 medium were mixed with siRNA at final concentration of 100 nM and electroporated at 400 V and 975 μF. using a Gene Pulser apparatus (Bio-Rad). Electroporated cells were divided into three wells of a six-well plate and cultured in DMEM containing 10% fetal calf serum for 6 hours. The culture media was then removed and 100 microliters of PR8 virus in infection medium, consisting of DMEM, 0.3% BSA, 10 mM Hepes, 100 units/ml penicillin and 100 μg/ml streptomycin, was added to each well. Infection was performed at an MOI of 0.2, 0.02 and 0.002 for each of the three wells, respectively. After incubation for 1 h at room temperature, 2 ml of infection medium containing 4 μg/ml trypsin was added to each well, and the cells were cultured at 37° C. under 5% CO2. At various times after infection, supernatants were harvested from infected cultures and the virus titer was determined by Hemagglutinin assay.

[0496] Results

[0497] To confirm the ability of the highly effective siRNAs identified in the first and second screens to inhibit influenza virus production, a third screen was performed in MDCK cells. MDCK cells are sensitive to even smaller amount of infection by laboratory strains of influenza virus than Vero cells. The virions replicate much faster in MDCK cells than in Vero cells. This third screen in MDCK cells further compared the efficiency of siRNAs in virus inhibition and confirmed the results of the first two screens with an accuracy of ˜85-90%.

[0498] At an MOI=0.2, 3 NP siRNAs reduced virus titer by at least 16-fold at 24 hours post-infection. 4 NP siRNAs (including 3 NP above), 2 PB2, 3 PB1 and 4 PA siRNAs reduced viral titer at least 8-fold. The following siRNAs represent the 13 most effective siRNAs tested: 154, 758, 1121, 1313, 2327, 3276, 4276, 5018, 5457, 7736, 7803, 8282, and 8286. At an MOI=0.02, 8 NP, 2 PB2, 3 PB1 and 8 PA siRNAs (including the siRNAs that were effective at MOI=0.2) reduced virus titer by at least 8-fold at 24 hours post-infection. At an MOI=0.002, 10 NP, 8 PB2, 11 PB 1, 10 PA siRNAs (including the effective siRNAs effective at MOI=0.02) reduce virus titer by at least 4-fold at 24 hours post-infection. No virus inhibition was observed by sicontrol siRNA.

[0499] Results of the screen are presented in Table 23. The columns show HA units at times 24, 36, 48, and in some cases 60 hours post-infection at MOI=0.2/0.02/0.002, respectively. Plates were tested in sets, and sicontrol represents the control siRNA tested with each set. NT=no treatment. The most effective siRNAs are shown in bold.

TABLE 23
Results of High Throughput Screen #3

| siRNA | 24 h | 36 h | 48 h | 60 h |
|---|---|---|---|---|
| sicontrol | 512/256/8 | 1024/512/32 | 1024/512/32 | 1024/512/64 |
| 1313 | 32/4/1 | 128/16/1 | 256/64/2 | 512/64/4 |
| 1488 | 128/32/1 | 256/64/2 | 512/256/8 | 1024/256/16 |
| 2283 | 128/64/2 | 256/128/2 | 256/256/4 | 256/256/8 |
| 2327 | 64/32/2 | 256/64/2 | 256/128/4 | 512/256/8 |
| 3276 | 64/32/1 | 128/64/2 | 256/128/8 | 256/128/16 |
| 3277 | 128/64/2 | 256/128/4 | 256/128/16 | 512/128/16 |

| siRNA | 24 h | 36 h | 48 h |
|---|---|---|---|
| sicontrol | 1024/256/16 | 2148/1024/32 | 2148/1024/64 |
| 154 | 32/4/1 | 128/8/1 | 128/16/1 |
| 1121 | 64/4/1 | 128/16/1 | 256/32/2 |
| 1122 | 256/16/1 | 512/64/1 | 1024/64/4 |
| 1316 | 256/32/2 | 1024/128/16 | 1024/128/32 |
| 1499 | 256/32/1 | 1024/128/4 | 2148/128/8 |
| 1590 | 512/256/4 | 1024/256/16 | 2148/256/32 |
| 1714 | 512/128/2 | 1024/256/8 | 1024/256/8 |
| 3693 | 512/256/2 | 1024/512/8 | 1024/512/16 |
| 3700 | 512/256/2 | 1024/512/16 | 1024/512/16 |
| 8289 | 512/128/2 | 1024/128/16 | 1024/256/32 |
| sicontrol | 1024/256/4 | 2148/512/16 | 2148/1024/32 |
| 758 | 128/16/1 | 512/64/1 | 512/64/4 |
| 5018 | 128/16/1 | 512/64/1 | 512/64/4 |
| 6732 | 256/32/1 | 512/64/4 | 1024/512/8 |
| 7580 | 256/16/1 | 512/64/4 | 1024/512/8 |
| 7581 | 256/32/1 | 512/64/4 | 1024/512/16 |
| 7648 | 256/32/1 | 512/64/4 | 1024/512/32 |
| 7736 | 128/32/1 | 256/64/4 | 1024/512/16 |
| 7803 | 64/16/1 | 256/64/1 | 1024/512/8 |
| 8282 | 128/16/1 | 512/32/2 | 1024/512/8 |
| 8286 | 128/32/1 | 256/128/8 | 1024/512/16 |
| 7807 | 256/64/1 | 512/128/8 | 1024/512/32 |
| NT | 1024/256/16 | 1024/512/32 | 1024/512/64 |
| sicontrol | 1024/256/16 | 1024/512/32 | 1024/512/64 |
| 4276 | 128/32/1 | 256/64/8 | 256/64/8 |
| 4283 | 512/64/2 | 512/128/16 | 512/128/16 |
| 4915 | 512/128/4 | 512/128/16 | 512/128/16 |
| 5457 | 128/32/1 | 256/64/4 | 256/64/8 |
| 5460 | 512/64/4 | 512/128/16 | 512/128/16 |
| 5584 | 512/128/2 | 512/128/16 | 512/128/16 |
| 5773 | 256/32/1 | 256/64/4 | 256/64/4 |
| 6081 | 512/128/2 | 512/128/16 | 512/128/16 |
| 6087 | 512/64/2 | 512/128/16 | 512/128/16 |
| 6089 | 512/128/4 | 512/256/32 | 512/256/32 |
| 8172 | 512/128/8 | 512/256/16 | 512/256/32 |
| 1225 | 512/64/4 | 512/64/16 | 512/64/32 |
| 1254 | 256/64/4 | 256/128/32 | 512/128/32 |

### Example 21

### siRNA Dose Response Test

[0500] Materials and Methods

[0501] Thirteen siRNAs selected from the third HTS and some siRNAs from the second HTS were tested for dose response in MDCK cells. 10 million MDCK cells in serum-free RPMI 1640 medium were mixed with siRNA at various siRNA concentrations ranging from 0.8 nM to 100 nM. siRNA was electroporated into cells at 400 V and 975 μF by using a Gene Pulser apparatus (Bio-Rad). Electroporated cells were divided into three wells of a six-well plate and cultured in DMEM containing 10% fetal calf serum for 6 hours. The culture media was then removed and 100 microliters of PR8 virus in infection medium, consisting of DMEM, 0.3% BSA, 10 mM Hepes, 100 units/ml penicillin and 100 μg/ml streptomycin, was added to each well, to attain an MOI of 0.2, 0.02 and 0.002 for each of the three wells. After incubation for 1 h at room temperature, 2 ml of infection medium containing 4 μg/ml trypsin was added to each well and the cells were cultured at 37C under 5% CO₂. At different times after infection, supernatants were harvested from infected cultures and the virus titer was determined by Hemagglutinin assay as described above.

[0502] Results: At MOI=0.2 and MOI=0.02, the minimum concentration of siRNAs that inhibit virus production by 2-fold at 24 hours post-infection are as follows, where asterisks indicate siRNAs that were identified as described in Example 1.

[0503] NP Gene Segment as Target:

| | |
|---|---|
| 154 | 0.8 nM |
| 758 | 1 nM |
| 1121 | 1 nM |
| 1313 | 0.8 nM |
| 1499 | 5 nM |
| NP1496* | 4 nM |

[0504] PB2 Gene Segment as Target:

| | |
|---|---|
| 2327 | 1 nM |
| 3276 | 1 nM |

[0505] PB1 Gene Segment as Target:

| | |
|---|---|
| 4276 | 1 nM |
| 5018 | 5 nM |
| 5457 | 5 nM |
| 5773 | 5 nM |
| PB1-2257* | 5 nM |

[0506] PA Gene Segment as Target:

| | |
|---|---|
| 7736 | 5 nM |
| 7803 | 1 nM |
| 8282 | 5 nM |
| 8286 | 5 nM |

[0507] Results are shown in Table 24 in terns of HA units at 24, 36, or 48 hours post-infection at MOI of 0.2/0.02/0.002 for various siRNA concentrations.

TABLE 24
Results of Dose Response Screen

| siRNA | 24 h | 36 h | 48 h |
|---|---|---|---|
| NT | 1024/128/2 | 2048/256/4 | 2048/256/8 |
| sicontrol 100 nM | 1024/128/2 | 2048/256/4 | 2048/256/8 |
| NP1496 0.8 nM | 1024/128/2 | 1024/256/4 | 2048/256/8 |
| NP1496 4 nM | 512/64/1 | 1024/256/4 | 2048/256/4 |
| NP1496 20 nM | 512/64/1 | 1024/256/4 | 2048/256/4 |
| 1313 0.8 nM | 512/64/1 | 1024/256/2 | 2048/256/4 |
| 1313 4 nM | 512/64/1 | 1024/128/2 | 2048/256/4 |
| 1313 20 nM | 256/32/1 | 512/64/1 | 1024/128/2 |
| 1313 25 nM | 128/8/1 | 256/32/1 | 512/64/1 |
| 154 0.8 nM | 512/64/1 | 1024/256/2 | 2048/256/4 |
| 154 4 nM | 512/64/1 | 1024/128/2 | 2048/128/2 |
| 154 20 nM | 256/32/1 | 512/64/1 | 1024/128/2 |
| 154 25 nM | 128/8/1 | 256/32/1 | 512/64/1 |
| 8172 100 nM | 512/128/1 | 1024/256/4 | 2048/256/8 |
| 8289 100 nM | 256/32/1 | 512/128/2 | 2048/256/4 |
| NT | 1024/128/2 | 2048/256/4 | 2048/256/8 |
| Sicontrol 100 nM | 1024/128/2 | 2048/256/4 | 2048/256/8 |
| 7803 1 nM | 512/64/1 | 1024/64/2 | 2048/128/4 |
| 7803 5 nM | 512/32/1 | 1024/64/2 | 1024/128/4 |
| 7803 25 nM | 256/32/1 | 512/64/2 | 1024/128/4 |
| 8282 1 nM | 1024/64/2 | 1024/128/4 | 2048/256/8 |
| 8282 5 nM | 512/64/1 | 1024/128/4 | 2048/256/8 |
| 8282 25 nM | 512/64/1 | 1024/128/4 | 1024/128/4 |
| 6696 100 nM | 512/32/1 | 1024/128/4 | 2048/256/8 |
| NT | 1024/128/2 | 2048/256/4 | 2048/256/8 |
| Sicontrol 25 nM | 1024/128/2 | 2048/256/4 | 2048/256/8 |
| 2327 1 nM | 512/64/1 | 1024/128/2 | 2048/128/8 |
| 2327 5 nM | 512/64/1 | 1024/128/2 | 2048/128/8 |
| 2327 25 nM | 512/32/1 | 1024/64/2 | 1024/64/8 |
| 3276 1 nM | 1024/64/2 | 1024/128/4 | 2048/128/8 |
| 3276 5 nM | 512/64/1 | 1024/128/2 | 2048/128/8 |
| 3276 25 nM | 512/64/1 | 1024/64/2 | 2048/64/4 |
| 758 1 nm | 512/64/1 | 1024/128/2 | 1024/128/4 |
| 758 5 nM | 512/64/1 | 1024/128/2 | 2048/128/8 |
| 758 25 nM | 256/32/1 | 1024/64/2 | 2048/64/8 |
| NT | 1024/128/2 | 2048/256/4 | 2048/512/8 |
| Sicontrol 25 nM | 1024/128/2 | 2048/256/4 | 2048/512/8 |
| 4276 1 nM | 512/64/1 | 1024/128/2 | 1024/128/4 |
| 4276 5 nM | 512/32/1 | 1024/64/2 | 1024/128/4 |
| 4276 25 nM | 256/16/1 | 512/32/1 | 512/64/2 |
| 5018 1 nM | 1024/64/2 | 2048/128/2 | 2048/256/4 |
| 5018 5 nM | 512/32/1 | 1024/64/2 | 1024/128/2 |
| 5018 25 nM | 256/16/1 | 512/32/1 | 1024/64/1 |
| 5457 1 nM | 1024/128/2 | 2048/256/4 | 2048/512/8 |
| 5457 5 nM | 512/32/1 | 1024/64/2 | 1024/128/4 |
| 5457 25 nM | 512/32/1 | 1024/64/2 | 1024/128/4 |
| 7736 1 nM | 1024/64/2 | 1024/128/4 | 2048/256/8 |
| 7736 5 nM | 512/64/1 | 1024/128/2 | 2048/256/4 |
| 7736 25 nM | 512/64/1 | 512/64/1 | 2048/256/4 |
| NT | 512/128/4 | 1024/256/8 | 1024/256/32 |
| Sicontrol 25 nM | 512/128/4 | 1024/256/8 | 1024/256/32 |
| 1121 1 nM | 256/128/4 | 512/256/8 | 512/256/32 |
| 1121 5 nM | 256/64/1 | 512/128/4 | 512/128/8 |
| 1121 25 nM | 128/32/1 | 256/64/1 | 512/64/4 |
| 5773 1 nM | 256/64/2 | 512/256/8 | 512/256/8 |
| 5773 5 nM | 256/64/1 | 512/128/2 | 512/128/4 |
| 5773 25 nM | 128/32/1 | 256/64/1 | 256/64/4 |
| PB1-2257 1 nM | 512/64/1 | 1024/128/4 | 1024/128/8 |
| PB1-2257 5 nM | 256/64/1 | 512/128/4 | 512/128/8 |
| PB1-2257 25 nM | 256/64/1 | 512/128/4 | 512/128/8 |
| NT | 1024/256/4 | 2048/512/16 | 2048/1024/32 |
| sicontrol 25 nM | 1024/256/4 | 2048/512/16 | 2048/1024/32 |
| 1499 1 nM | 1024/256/4 | 2048/256/8 | 2048/512/16 |
| 1499 5 nM | 512/64/2 | 2048/128/4 | 2048/256/8 |
| 1499 25 nM | 512/32/1 | 2048/64/2 | 2048/64/4 |
| 8286 1 nM | 1024/128/2 | 2048/256/4 | 2048/256/8 |
| 8286 5 nM | 512/64/2 | 2048/128/4 | 2048/256/8 |
| 8286 25 nM | 512/64/2 | 2048/128/4 | 2048/256/8 |
| 1499 + 8286 2.5 + 2.5 | 1024/256/2 | 2048/256/4 | 2048/256/8 |

### Example 22

### Effective Inhibition of Influenza Virus Using siRNA Combinations

[0508] Certain siRNAs selected from the third HTS and some siRNAs from the second HTS were tested for their anti-influenza effect in combination. The transfection, infection, and viral titer tests were performed as described in Example 21. The transfection of 1499 and 4276 together, with each siRNA at 12.5 nM, suppresses virus production slightly more effectively than either 1499 or 4276 alone at 25 nM.

TABLE 25
Effect of siRNAs in Combination

| siRNA | 24 h | 36 h | 48 h |
|---|---|---|---|
| NT | 1024/128/4 | 2048/256/8 | 2048/512/16 |
| sicontrol 50 nM | 1024/128/4 | 2048/256/8 | 2048/512/16 |
| 1499 + 8282 12.5 + 12.5 | 512/32/1 | 1024/64/2 | 1024/128/8 |
| 1499 + 4276 12.5 + 12.5 | 256/16/1 | 512/32/1 | 512/64/4 |
| 8282 + 4276 12.5 + 12.5 | 512/32/1 | 1024/64/2 | 1024/128/8 |
| 1499 + 8282 25 + 25 | 512/32/1 | 1024/64/2 | 1024/128/8 |
| 1499 + 4276 25 + 25 | 256/16/1 | 512/32/1 | 512/64/2 |
| 8282 + 4276 25 + 25 | 256/32/1 | 1024/64/2 | 1024/128/4 |
| 1499 25 nM | 512/32/1 | 1024/64/2 | 1024/128/8 |
| 1499 50 nM | 512/16/1 | 1024/64/2 | 1024/128/8 |
| 8282 25 nM | 512/64/1 | 1024/128/4 | 1024/128/8 |
| 8282 50 nM | 512/32/1 | 1024/64/2 | 1024/128/8 |
| 4276 25 nM | 256/32/1 | 512/64/2 | 1024/128/8 |
| 4276 50 nM | 256/16/1 | 512/32/1 | 512/64/2 |

### Example 23

### Inhibition of Influenza Virus by Direct Delivery of Naked siRNA to the Respiratory System

[0509] Materials and Methods

[0510] siRNA preparation, viral infection, lung harvests, and influenza virus titer assays were performed as described in Example 12. Mice were anesthetized using isofluorane (administered by inhalation). siRNA was delivered in a volume of 50 μl by intranasal drip. p values were computed using Student's T test.

[0511] Results

[0512] siRNA (NP-1496) in phosphate buffered saline (PBS) was administered to groups of mice (5 mice per group). Mice were infected with influenza virus (2000 PFU) 3 hours after siRNA administration. Lungs were harvested 24 hours post-infection and virus titer measured. In a preliminary experiment mice were anesthetized with avertin and 2 mg/kg siRNA was administered by intranasal drip. A reduction in virus titer relative to controls was observed, although it did not reach statistical significance (data not shown).

[0513] In a second experiment, Black Swiss mice were anesthetized using isofluorane/O₂. Various amounts of siRNA in PBS was intranasally administered into the mice., 50 ul each mouse. Three different groups (5 mice per group) received doses of 2 mg/kg, 4 mg/kg, or 10 mg/kg siRNA in PBS by intranasal drip. A fourth group that received PBS alone served as a control. Three hours later, the mice were anesthetized again using isofluorane/O₂, 30 ul of PR8 virus (2000 pfu=4× lethal dose) was intranasally administered into the mice. 24 h after infection, the mouse lungs were harvested, homogenized and virus titer was measured by evaluation of the TCID₅₀ as described above. Serial 5-fold dilutions of the lung homogenate were performed rather than 10-fold dilutions.

[0514] A significant and dose-dependent differerence in virus titer was seen between mice in each of the three treated groups and the controls. The reduction in virus titer relative to controls was 3.45-fold (p=0.0125), 4.16-fold (p=0.0063), and 4.62-fold (p=0.0057) in the groups that received doses of 2 mg/kg, 4 mg/kg, and 10 mg/kg respectively. Data for the individual mice (TCID₅₀) is presented in Table 27 and shown in FIG. 31A.

[0515] In summary, these results demonstrate the efficacy of siRNA delivered to the respiratory system in an aqueous medium in the absence of specific agents to enhance delivery.

TABLE 27
Intranasal Delivery of Naked siRNA Inhibits Influenza Virus Production

| Treatment | log₁₀TCID50 | | | | | Average | P value |
|---|---|---|---|---|---|---|---|
| PBS | 26718.37 | 45687.78 | 45687.78 | 15625 | 26718.37 | 32087.46 | |
| NP (2 mg/kg) | 15625 | 15625 | 3125 | 3125 | 9137.56 | 9327.51 | 0.008 |
| NP (4 mg/kg) | 9137.56 | 9137.56 | 5343.68 | 9137.56 | 5343.68 | 7620 | 0.004 |
| NP (10 mg/kg) | 9137.56 | 9137.56 | 9137.56 | 3125 | 3125 | 6732.53 | 0.003 |

[0516] Example 24

### Inhibition of Influenza Virus Production in Mice by Direct Delivery of Naked siRNA to the Respiratory System

[0517] This example confirms results of Example 23 and demonstrates inhibition of influenza virus production in the lung by administration of siRNA targeted to NP to the respiratory system in an aqueous medium in the absense of delivery-enhancing agents. 6 μg, 15 μg, 30 μg, and 60 μg of NP-1496 siRNAs or 60 μg of GFP-949 siRNAs in PBS were intranasally instilled into mice essentially as described in Example 23, except that mice were intranasally infected with PR8 virus, 1000 pfu per mouse, 2 hours after siRNA delivery. Lungs were harvested 24 hours after infection. As shown in Table 28 and FIG. 31B, NP-specific siRNA was effective for the inhibition of influenza virus when administered by intranasal instillation in an aqueous medium in the absence of delivery agents. A significant and dose-dependent differerence in virus titer was seen between mice in each of the three treated groups and the controls.

TABLE 28
Inhibition of Influenza Virus Production in the Lung Using Naked siRNA

| Treatment | TCID50 | | | | | Average | P value |
|---|---|---|---|---|---|---|---|
| PBS | 125 | 365.5 | 213.7 | 365.5 | 125 | 239.95 | |
| GFP (60 μg) | 125 | 213.7 | 213.7 | 213.7 | 365.5 | 226.32 | |
| NP (6 μg) | 213.7 | 213.7 | 125 | 213.7 | 42.7 | 161.8 | 0.263 |
| NP (15 μg) | 125 | 125 | 42.7 | 25 | 73.1 | 78.17 | 0.024 |
| NP (30 μg) | 8.5 | 125 | 42.7 | 125 | 14.6 | 63.18 | 0.019 |
| NP (60 μg) | 73.1 | 14.6 | 25 | 25 | 25 | 32.54 | 0.006 |

### Example 25

### siRNAs Targeted to Influenza Virus Transcripts Tolerate Mismatches in the Target Region

[0518] This example demonstrates that siRNAs whose antisense strands are less than 100% complementary to the targeted transcript within the inhibitory region (e.g., within the 19 base pair region that is complementary to the target transcript) mediate effective silencing. The results demonstrate that the RNAi agents described herein will effectively inhibit a wide range of influenza strains whose sequences vary from that of PR8 within the target portion.

[0519] Materials and Methods

[0520] A dual luciferase assay, as described in Example 18, was used to evaluate the ability of siRNAs to inhibit expression of influenza genes that are not 100% complementary to the antisense strand of the siRNA within the 19 nucleotide inhibitory region. Mismatches derived from the alignment of human and avian influenza virus strains (using PR8 as standards) were introduced into the DNA vector (psiCHECK) using a site-directed mutagenesis kit (Stratagene), i.e., the influenza target site was modified to include either 1 or 2 differences relative to the PR8 sequence, with the specific differences corresponding to differences found in one or more of the human or avian influenza strains listed in Table 15.

[0521] Table 29 shows results of an experiment demonstrating that variations in the viral NP target (target for NP-1496) do not substantially reduce RNAi activity. (The data shown is the average of triplicates). Mismatches at positions near the 5′ or 3′ end of the antisense strand, or near the middle, were tested.

TABLE 29
Effect of mismatches between antisense strand and target region on silencing
by NP-1496

| | | | | C12 to | C15 to | A18 to |
|---|---|---|---|---|---|---|
| | Original | A3 to G3 | T9 to C9 | T12 | T15 | G18 |
| Renilla luciferase | 85.6 | 81.8 | 58.3 | 67.8 | 72.9 | 54.7 |
| silencing (%) | | | | | | |
| Remaining silencing | 100 | 91.3 | 65.1 | 75.7 | 81.4 | 61.1 |
| comparing with original | | | | | | |
| (%) | | | | | | |

[0522] Table 30 shows results of an experiment demonstrating that variations in the viral PA target (target for PA-2087 or PA-8242) do not substantially reduce RNAi activity. (The data shown as the average of triplicates). However, G18 to A18 mutations found in 7 among 157 human influenza strains did substantially affect the RNA interference activity. (The data shown is the average of triplicates). Mismatches at positions near the 5′ or 3′ end of the antisense strand, or near the middle, were tested. The presence of two mismatches between the antisense strand inhibitory region and the target reduced the silencing by about 70-75%, but a useful degree of silencing was still observed.

TABLE 30
Effect of mismatches between antisense strand and target region on silencing by PA-
2087 or PA-8242

| | | | | | | | | T6 to |
|---|---|---|---|---|---|---|---|---|
| | | | T6 | T6 | | | | C6 and |
| | | A4 to | to | to | C15 to | G18 to | A19 to | C15 to |
| | Original | G4 | A6 | C6 | T15 | A18 | G19 | T15 |
| Renilla luciferase | 91.7 | 80.8 | 75.9 | 88.8 | 87.5 | 7.0 | 89.3 | 26.8 |
| silencing (%) | | | | | | | | |
| Remaining | 100 | 88.1 | 82.8 | 96.9 | 95.5 | 7.6 | 97.4 | 29.3 |
| silencing | | | | | | | | |
| comparing with | | | | | | | | |
| original (%) | | | | | | | | |

[0523] Table 31 shows results of an experiment demonstrating that variations in the viral PB2 target (target for PB2-3817) do not substantially reduce RNAi activity. (The data shown is the average of triplicates).

TABLE 31
Effect of mismatches between antisense strand and
target region on silencing by PB2-3817

| | Original | A17 to G17 | A18 to T18 |
|---|---|---|---|
| Renilla luciferase | 86.7 | 73.4 | 75.8 |
| silencing (%) | | | |
| Remaining silencing | 100 | 100 | 87.4 |
| comparing with | | | |
| original (%) | | | |

[0524] Table 32A shows results of an experiment demonstrating that variations in the viral PB1 target (target for PB1-6124) do not substantially reduce RNAi activity. (The data shown is the average of triplicates). Mismatches at positions near the 5′ or 3′ end of the antisense strand, or near the middle, were tested. The presence of two mismatches between the antisense strand inhibitory region and the target reduced the silencing by about 70-75%, but a useful degree of silencing was still observed.

TABLE 32A
Effect of mismatches between antisense strand and target region on
silencing by PB1-6124

| | | | | | | T8 to C8 |
|---|---|---|---|---|---|---|
| | | | | T8 to | T12 to | and C15 |
| | Original | A1 to T1 | A5 to G5 | C8 | C12 | to T15 |
| Renilla | 82.2 | 83.9 | 77.8 | 63.3 | 83.2 | 26.5 |
| luciferase | | | | | | |
| silencing | | | | | | |
| (%) | | | | | | |
| Remaining | 100 | 100 | 94.7 | 77 | 100 | 32.2 |
| silencing | | | | | | |
| comparing | | | | | | |
| with | | | | | | |
| original | | | | | | |
| (%) | | | | | | |

[0525] Table 32B shows results of an additional experiment demonstrating that variations in the viral PB1 target (target for PB1-6124) do not substantially reduce RNAi activity. (The data shown is the average of triplicates). Mismatches at positions near the 5′ or 3′ end of the antisense strand were tested. The presence of two mismatches between the antisense strand inhibitory region and the target did not substantially reduce RNAi activity.

TABLE 32B
Effect of mismatches between antisense strand and target region on silencing
by PB1-6124

| | | C15 to | A1 to | T2 to | G3 to | A1 to T1 and G3 |
|---|---|---|---|---|---|---|
| PB1 (Lab ID# 6124 siRNA) | Original | T15 | G1 | C2 | A3 | to A3 |
| Renilla luciferase silencing | 84.1 | 71.8 | 82.8 | 84.5 | 74.9 | 73.9 |
| (%) | | | | | | |
| Remaining silencing | 100 | 85.4 | 98.5 | 100 | 89.1 | 87.9 |
| comparing with original (%) | | | | | | |

[0526] Table 32C shows results of an additional experiment demonstrating that variations in the viral PB1 target (target for PB1-6129) do not substantially reduce RNAi activity. (The data shown is the average of triplicates). Mismatches at positions near the 5′ or 3′ end of the antisense strand, or near the middle, were tested. A mismatch (G:U wobble) at position 10 had only a relatively small effect on silencing, demonstrating that such mismatches at position 10 do not substantially reduce RNAi activity in this context. The presence of two mismatches between the antisense strand inhibitory region and the target moderately reduced the silencing, but a about 60-70% of the original silencing effect was still observed.

TABLE 32C
Effect of mismatches between antisense strand and target region on silencing by
PB1-6129
Table xx: effect of mismatches between antisense strand and target region on silencing
by PB1-6129.

| | | T3 to | T7 to | T2 to | C10 to | T3 to C3 and C10 |
|---|---|---|---|---|---|---|
| PB1 (Lab ID# 6129 siRNA) | Original | C3 | C7 | C2 | T10 | to T10 |
| Ranilla luciferase silencing | 86.4 | 87.3 | 84.4 | 84.5 | 81.3 | 59.0 |
| (%) | | | | | | |
| Remaining silencing | 100 | 100 | 97.8 | 100 | 94.2 | 68.3 |
| comparing with original (%) | | | | | | |

### Example 26

### Modified SiRNAs Mediate Effective Silencing

[0527] To explore the silencing potential of siRNAs containing modified nucleotides, NP-1496 siRNA containing sense and antisense strands with 2′-O-methyl modifications at alternate ribonucleotides in each strand were synthesized and tested in comparison with unmodified NP-1496 siRNA. The 2′-O-methyl modified NP1496 siRNA sequences were as follows: (2′-O-methyl shown as “m” in front of the modified nucleotide):

[0528] Sense: 5′-GmGA mUCmU UmAU mLUmC UmUC mGGmA G dTdT-3′ (SEQ ID NO: 381)

[0529] Antisense: 5′-mCUmC CmGA mAGmA AmAU mAAmG AmUC mC dTdT-3′ (SEQ ID NO: 382)

[0530] The 2′-O-methyl modified NP1496 siRNA and unmodified NP1496 siRNA were transfected into Vero cells in 24-well plate using lipofectamine 2000 (Invitrogen) following the manufacturer's instructions. 6 hours after transfection, the culture media was aspirated. The cells were inoculated with 200 ul of PR8 virus at MOI of 0.1. The culture supernatant was collected at 24, 36 and 48 hours after infection. Virus titer was determined as described above. The 2′-O-methyl modified NP1496 showed slightly more inhibition of virus growth than unmodified NP1496. Results are shown in Table 33.

TABLE 33
Effective Inhibition of Influenza Virus Production
Using Modified siRNA

| HA units | 24 h | 36 h | 48 h |
|---|---|---|---|
| No siRNA control | 4 | 8 | 16 |
| Unmodified NP1496 (400 uM) | 1 | 2 | 8 |
| Modified NP1496 (100 uM) | 1 | 2 | 8 |
| Modified NP1496 (200 uM) | 1 | 2 | 4 |
| Modified NP1496 (400 uM) | 1 | 1 | 4 |

### Example 27

### Summary of Screens and Tests to Identify Highly Effective siRNAs

[0531] The results of the screens and in vitro and in vivo tests described above were collected and combined to generate an overall list of influenza virus sequences that are both highly conserved and are targets of highly potent siRNAs. The list of target portions is presented in Table 34. These sequences also represent complements of the inhibitory region of antisense strands of certain highly effective RNAi-inducing agents, e.g., siRNAs.

TABLE 34

Highly Conserved Influenza Virus Sequences
that are Targets for Highly Effective
RNAi-Inducing Entities

| | | | |
|---|---|---|---|
| | SEQ | | Lab |
| | ID | Target | ID |
| Sequence | NO: | Gene | NO: |

| | | | |
|---|---|---|---|
| GCCACTGAAATCAGAGCAT | 272 | NP | 109 |
| TCAGAGCATCCGTCGGAAA | 273 | NP | 119 |
| GGACGATTCTACATCCAAA | 274 | NP | 154 |
| CAGCTTAACAATAGAGAGA | 275 | NP | 222 |
| GCTTAACAATAGAGAGAAT | 276 | NP | 224 |
| AATAGAGAGAATGGTGCTC | 277 | NP | 231 |
| GGGAAAGATCCTAAGAAAA | 278 | NP | 301 |
| GGAAAGATCCTAAGAAAAC | 279 | NP | 302 |
| TGAGAGAACTCATCCTTTA | 280 | NP | 359 |
| TTATGACAAAGAAGAAATA | 281 | NP | 375 |
| ACAAGAATTGCTTATGAAA | 282 | NP | 688 |
| GAATTGCTTATGAAAGAAT | 283 | NP | 692 |
| AAGCAATGATGGATCAAGT | 284 | NP | 752 |
| GCAATGATGGATCAAGTGA | 285 | NP | 754 |
| TGATGGATCAAGTGAGAGA | 286 | NP | 758 |
| CCACTAGAGGAGTTCAAAT | 287 | NP | 1121 |
| CACTAGAGGAGTTCAAATT | 288 | NP | 1122 |
| GAGGAAACACCAATCAACA | 289 | NP | 1223 |
| GGAAACACCAATCAACAGA | 290 | NP | 1225 |
| GGGCCAAATCAGCATACAA | 291 | NP | 1254 |
| CAACCATTATGGCAGCATT | 292 | NP | 1313 |
| CCATTATGGCAGCATTCAA | 293 | NP | 1316 |
| AGGATGATGGAAAGTGCAA | 294 | NP | 1381 |
| GATGATGGAAAGTGCAAGA | 295 | NP | 1383 |
| GAGTAATGAAGGATCTTAT | 296 | NP | 1488 |
| GGATCTTATTTCTTCGGAG | 297 | NP | 1498 |
| GATCTTATTTCTTCGGAGA | 298 | NP | 1499 |
| TCTTATTTCTTCGGAGACA | 299 | NP | 1501 |
| GGAGTACGACAATTAAAGA | 300 | NP | 1527 |
| GAACTAAGAAATCTAATGT | 301 | PB2 | 1590 |
| TGAAATGGATGATGGCAAT | 302 | PB2 | 1714 |
| GGAACATGCTGGGAACAGA | 303 | PB2 | 2283 |
| GAATGATGATGTTGATCAA | 304 | PB2 | 2327 |
| AATGGAATTTGAACCATTT | 305 | PB2 | 3276 |
| ATGGAATTTGAACCATTTC | 306 | PB2 | 3277 |
| GCACTAAGCATCAATGAAC | 307 | PB2 | 3693 |
| GCATCAATGAACTGAGCAA | 308 | PB2 | 3700 |
| GGAGACGTGGTGTTGGTAA | 379 | PB2 | 3759 |
| CGGGACTCTAGCATACTTA | 309 | PB2 | 3789 |
| ACTGACAGCCAGACAGCGA | 310 | PB2 | 3807 |
| AGACAGCGACCAAAAGAAT | 311 | PB2 | 3817 |
| GAATTCGGATGGCCATCAA | 312 | PB2 | 3832 |
| GCAGGCAAACCATTTGAAT | 313 | PB1 | 3878 |
| AGGCAAACCATTTGAATGG | 314 | PB1 | 3880 |
| GCAAACCATTTGAATGGAT | 315 | PB1 | 3882 |
| CCATTTGAATGGATGTCAA | 316 | PB1 | 3887 |
| CAGGATACACCATGGATAC | 380 | PB1 | 4001 |
| GACAATGAACCAAGTGGTT | 317 | PB1 | 4120 |
| AAGCAATGGCTTTCCTTGA | 318 | PB1 | 4163 |
| ACCTATGACTGGACTCTAA | 319 | PB1 | 4276 |
| ACTGGACTCTAAATAGAAA | 320 | PB1 | 4283 |
| CTCCAATAATGTTCTCAAA | 321 | PB1 | 4913 |
| CCAATAATGTTCTCAAACA | 322 | PB1 | 4915 |
| GAAACTTAGAACTCAAATA | 323 | PB1 | 4980 |
| GCATCGATTTGAAATATTT | 324 | PBL | 5018 |
| ACATTTGAATTCACAAGTT | 325 | PB1 | 5359 |
| CATTTGAATTCACAAGTTT | 326 | PB1 | 5360 |
| GGACATGAGTATTGGAGTT | 327 | PB1 | 5457 |
| CATGAGTATTGGAGTTACT | 328 | PB1 | 5460 |
| ATGCCATAGAGGTGACACA | 329 | PB1 | 5574 |
| CATAGAGGTGACACACAAA | 330 | PB1 | 5578 |
| TAGAGGTGACACACAAATA | 331 | PB1 | 5580 |
| GGTGACACACAAATACAAA | 332 | PB1 | 5584 |
| CCAAATTTATACAACATTA | 333 | PB1 | 5680 |
| CCACTGAACCCATTTGTCA | 334 | PB1 | 5773 |
| AGCCATAAAGAAATTGAAT | 335 | PB1 | 5791 |
| CCATAAAGAAATTGAATCA | 336 | PB1 | 5793 |
| ATAAAGAAATTGAATCAAT | 337 | PB1 | 5795 |
| AGAAATCGATCCATCTTGA | 338 | PB1 | 5902 |
| TTGAAGATGAACAAATGTA | 339 | PB1 | 5942 |
| AAGATGAACAAATGTACCA | 340 | PB1 | 5945 |
| GATGAACAAATGTACCAAA | 341 | PB1 | 5947 |
| CAGCAGTTCATACAGAAGA | 342 | PB1 | 5997 |
| TTTCGAATCTGGAAGGATA | 343 | PB1 | 6081 |
| ATCTGGAAGGATAAAGAAA | 344 | PB1 | 6087 |
| CTGGAAGGATAAAGAAAGA | 345 | PB1 | 6089 |
| ATGAAGATCTGTTCCACCA | 346 | PB1 | 6124 |
| GATCTGTTCCACCATTGAA | 347 | PB1 | 6129 |
| ACCTGAAAATCGAAACAAA | 348 | PA | 6351 |
| GCACAGATTTGAAATAATC | 349 | PA | 6436 |
| GAATAGATTCATCGAAATT | 350 | PA | 6559 |
| ACTACACTCTCGATGAAGA | 351 | PA | 6696 |
| AAACCAGACTATTCACCAT | 352 | PA | 6732 |
| TCACCATAAGACAAGAAAT | 353 | PA | 6744 |
| GGAATAAATCCAAATTATC | 354 | PA | 7202 |
| CTAGCAAGTTGGATTCAGA | 355 | PA | 7424 |
| CCAATTGAACACATTGCAA | 356 | PA | 7517 |
| GCCACAGAATACATAATGA | 357 | PA | 7580 |
| CCACAGAATACATAATGAA | 358 | PA | 7581 |
| GGATGATTTCCAATTAATT | 359 | PA | 7648 |
| GGAAGATCCCACTTAAGGA | 360 | PA | 7736 |
| ACCCAAGACTTGAACCACA | 361 | PA | 7803 |
| AAGACTTGAACCACATAAA | 362 | PA | 7807 |
| CTCCACAACTAGAAGGATT | 362 | PA | 8172 |
| GGCTATATGAAGCAATTGA | 363 | PA | 8271 |
| GCAATTGAGGAGTGCCTGA | 364 | PA | 8282 |
| ATTGAGGAGTGCCTGATTA | 365 | PA | 8285 |
| TTGAGGAGTGCCTGATTAA | 366 | PA | 8286 |
| AGGAGTGCCTGATTAATGA | 367 | PA | 8289 |
| GATTAATGATCCCTGGGTT | 368 | PA | 8299 |
| ATTAATGATCCCTGGGTTT | 369 | PA | 8300 |
| TGATCCCTGGGTTTTGCTT | 370 | PA | 8305 |
| CCGAGGTCGAAACGTACGT | 371 | M | 8447 |
| ACCAATCCTGTCACCTCTG | 372 | M | 8580 |
| CAGTGAGCGAGGACTGCAG | 373 | M | 8640 |
| GACGCTTTGTCCAAAATGC | 374 | M | 8663 |
| TGGCTGGATCGAGTGAGCA | 375 | M | 9008 |
| TGTGGATTCTTGATCGTCT | 376 | M | 9240 |
| GTCTATGAGGGAAGAATAT | 377 | M | 9331 |
| GTCAGGCTAGGCAAATGGT | 378 | M | M645 |

### Equivalents

[0532] Those skilled in the art will recognize, or be able to ascertain using no more than routine experimentation, many equivalents to the specific embodiments of the invention described herein. The scope of the present invention is not intended to be limited to the above Description, but rather is as set forth in the claims that follow the reference list..

### REFERENCES

[0533] 1. Lamb, R. A., and R. M. Krug. 2001. Orthomyxoviridae: the viruese and their replication. Fundamental Virology Ed. D. M. Knipe & P. M. Hpwley:725-770.
[0534] 2. Simonsen, L., K. Fukuda, L. B. Schomberger, and N. J. Cox. 2000. The impact of influenza epidemics on hospitalizations. J. Infect. Dis. 181:831-837.
[0535] 3. Webster, R. G., W. J. Bean, O. T. Gorman, T. M. Chambers, and Y. Kawaoka. 1992. Evolution and ecology of influenza A viruses. Microbiol. Rev. 56:152-179.
[0536] 4. Parvin, J. D., A. Moscona, W. T. Pan, J. M. Leider, and P. Palese. 1986. Measurement of the mutation rates of animal viruses: influenza A virus and poliovirus type 1. J. Virol. 59:377-383.
[0537] 5. Smith, F. L., and P. Palese. 1989. Variation in influenza virus genes:epidemiology, pathogenic, and evolutionary consequences. The influenza viruses Krug, R. M. ed.:New York:Plenum.
[0538] 6. Webster, R. G., W. G. Laver, G. M. air, and S. G. C. 1982. Molecular mechanisms of variation in influenza viruses. Nature 296:115-121.
[0539] 7. Webby, R. J., and R. G. Webster. 2001. Emergence of influenza A viruses. Phil. Trans. R. Soc. Lond. 356:1817-1828.
[0540] 8. Patterson, K. D., and G. F. Pyle. 1991. The geography and mortality of the 1918 influenza pandemic. Bull. Hist. Med. 65:4-21.
[0541] 9. Taubenberger, J. K., A. H. Reid, T. A. Janczewski, and T. G. GFanning. 2001. Integrating historical, clinical and molecular genetic data in order to explain the origin and virulence of the 1918 Spanish influenza virus. Phil. Trans. R. Soc. Lond. 356:1829-1839.
[0542] 10. Claas, E. C., A. D. Osterhaus, R. van Beek, J. C. De Jong, G. F. Rimmelzwaan, D. A. Senne, S. Krauss, K. F. Shortridge, and R. G. Webster. 1998. Human influenza A H5N1 virus related to a highly pathogenic avian influenza virus. Lancet 351:472-477.
[0543] 11. Yuen, K. Y., P. K. Chan, M. Peiris, D. N. Tsang, T. L. Que, K. F. Shortridge, P. T. Cheung, W. K. To, E. T. Ho, R. Sung, and A. F. Cheng. 1998. Clinical features and rapid viral diagnosis of human disease associated with avian influenza A H5N1 virus. Lancet 351:467-471.
[0544] 12. Fukuda, F., C. B. Bridges, and T. L.e.a. Brammer. 1999. Prevention and control of influenza: recommendations of the advisory committee on immunization practices (ACIP). MMWR Morb. Mortal. Wkly. Rep. 48:1-28.
[0545] 13. Castle, S. C. 2000. Clinical relevane of age-related immune dysfunction. Clin. Infect. Dis. 31:578-585.
[0546] 14. Luscher-Mattli, M. 2000. Influenza chemotherapy: a review of the present state of art and of new drugs in development. Arch. Virol. 145:2233-2248.
[0547] 15. Cox, N. J., and K. Subbarao. 1999. Influenza. Lancet 354:1277-1282.
[0548] 16. Vaucheret, H., C. Beclin, and M. Fagard. 2001. Post-transcriptional gene silencing in plants. J. Cell Sci. 114:3083-3091.
[0549] 17. Sharp, P. A. 2001. RNA interference-2001. Genes Dev. 15:485-490.
[0550] 18. Brantl, S. 2002. Antisense-RNA regulation and RNA interference. Biochem. Biophy. Acta 1575:15-25.
[0551] 19. Baulcombe, D. 2002. RNA silencing. Curr. Biol. 12:R82-R84.
[0552] 20. Fire, A., S. Xu, M. K. Montgomery, S. A. Kostas, S. E. Driver, and M. C. C. 1998. Potent and specific genetic interference by double-stranded RNA in Caenorhabditis elegans. Nature 391:806-811.
[0553] 21. Elbashir, S., J. Harborth, W. Lendeckel, A: Yalcin, K. Weber, and T. Tuschl. 2001. Duplexes of 21-nucleotide RNAs mediate RNA interference in cultured mammalian cells. Nature 411:494-498.
[0554] 22. McManus, M. T., and P. A. Sharp. 2002. Gene silencing in mammals by short interfering RNAs. Nature Rev. Gene. 3:737-747.
[0555] 23. Kumar, M., and G. G. Carmichael. 1998. Antisense RNA: function and fate of duplex RNA in cells of higher eukaryotes. Microbiol. Mol. Biol. Rev. 62:1415-1434.
[0556] 24. Gitlin, L., S. Karelsky, and R. Andino. 2002. Short interfering RNA confers intracellular antiviral immunity in human cells. Nature 418:430-434.
[0557] 25. Pderoso de Lima, M. C., S. Simoes, P. Pires, H. Faneca, and N. Duzgunes. 2001. Cationic lipid-DNA complexes in gene delivery: from biophysics to biological applications. Adv. Drug Deliv. Rev. 47:277-294.
[0558] 26. Holen, T., M. Amarzguioui, M. T. Wiiger, E. Babaie, and H. Prydz. 2002. Positional effects of short interfering RNAs targeting the human coagulation trigger tissue factor. Nucleic Acids Res. 30:1757-1766.
[0559] 27. McManus, M. T., Haines, B. B., Dillon, C. P., Whitehurst, C. E., van Parijs, L., Chen, J., and Sharp, P. A. (2002). Small interfering RNA-mediated gene silencing in T lymphocytes. J Immunol 169, 5754-5760.
[0560] 28. Elbashir, S. M., J. Martinez, A. Patkaniowska, W. Lendeckel, and T. Tuschl. 2001. Functional anatomy of siRNAs for mediating efficient RNAi in Drosophila melanogaster embryo lysate. EMBO J. 20:6877-6888.
[0561] 29. Yang, D., H. Lu, and J. W. Erickson. 2000. Evidence that processed small dsRNAs may mediate sequence-specific mRNA degradation during RNAi in Drosophila embryos. Curr. Biol. 10:1191-1200.
[0562] 30. Caplen, N. J., J. Fleenor, A. Fire, and R. A. Morgan. 2000. dsRNA-mediated gene silencing in cultured Drosophila cells: a tissue culture model for the analysis of RAN interference. Gene 252:95-105.
[0563] 31. Edwards, D. A., J. Hanes, G. Caponetti, J. Hrkach, A. Ben-Jebria, M. L. Eskew, J. Mintzes, D. Deaver, N. Lotan, and R. Langer. 1997. Large porous particles for pulmonary drug delivery. Science 276:1868-1871.
[0564] 32. Putnam, D., C. A. Gentry, D. W. Pack, and R. Langer. 2001. Polymer-based gene delivery with low cytotoxicity by a unique balance of side-chain termini. Proc. Natl. Acad. Sci. USA 98:1200-1205.
[0565] 33. Lynn, D. M., and R. Langer. 2000. Degradable Poly(-amino esters): Synthesis, Characterization, and Self-Assembly with Plasmid DNA. J. Am. Chem. Soc. 122:10761-10768.
[0566] 34. Lynn, D. M., D. G. Anderson, D. Putnam, and R. Langer. 2001. Accelerated discovery of synthetic transfection vectors: parallel synthesis and screening of a degrable polymer library. J. Am. Chem. Soc. 123:8155-8156.
[0567] 35. Han, S.-O., R. I. Mahato, Y. K. Sung, and S. W. Kim. 2000. Development of Biomaterials for gene therapy. Mol. Therapy 2:302-317.
[0568] 36. Soane, R. J., M. Frier, A. C. Perkins, N. S. Jones, S. S. Davis, and L. Illum. 1999. Evaluation of the clearance characteristics of bioadhesive systems in humans. Int. J. Pharm. 178:55-65.
[0569] 37. Boussif, O., F. Lezoualc'h, M. A. Zanta, M. D. Mergny, D. Scherman, B. Demeneix, and J. P. Behr. 1995. A versatile vector for gene and oligonucleotide transfer into cells in culture and in vivo: polyethylenimine. Proc. Natl. Acad. Sci. USA 92:7297-7301.
[0570] 38. Astafieva, I., I. Maksimova, E. Lukanidin, V. Alakhov, and A. Kabanov. 1996. Enhancement of the polycation-mediated DNA uptake and cell transfection with Pluronic P85 block copolymer. FESB Lett. 389:278-280.
[0571] 39. Davis, S. S. 1999. Delivery of peptide and non-peptide drugs through the respiratory tract. Pharm. Sci. Technol. Today 2:450-457.
[0572] 40. Roy, K., H.-Q. Mao, S.-K. Huang, and K. W. Leong. 1999. Oral delivery with chitosan/DNA nanoparticles generates immunologic protection in murine model of peanut allergy. Nat. Med. 5:387-391.
[0573] 41. Hansen, M. B., S. E. Nielsen, and K. Berg. 1989. Re-examination and further development of a precise and rapid dye method for measuring cell growth/cell kill. J. Immunol. Methods 119:203-210.
[0574] 42. Green, M., and P. M. Loewenstein. 1988. Autonomous functional domains of chemically synthesized human immunodeficiency virus tat trans-activator protein. Cell 55:1179-1188.
[0575] 43. Frankel, A. D., and C. O. Pabo. 1988. Cellular uptake of the tat protein from human immunodeficiency virus. Cell 55:1189-1193.
[0576] 44. Elliott, G., and P. O'Hare. 1997. Intercellular trafficking and protein delivery by a herpesvirus structural protein. Cell 88:223-233.
[0577] 45. Joliot, A., C. Pernelle, H. Deagostini-Bazin, and A. Prochiantz. 1991. Antennapedia homeobox peptide regulates neural morphogenesis. Proc. Natl. Acad. Sci. USA 88:1864-1868.
[0578] 46. Fawell, S., J. Seery, Y. Daikh, C. Moore, L. L. Chen, B. Pepinsky, and J. Barsoum. 1994. Tat-mediated delivery of heterologous proteins into cells. Proc. Natl. Acad. Sci. USA 91:664-668.
[0579] 47. Schwarze, S. R., A. Ho, A. Vocero-Akbani, and S. F. Dowdy. 1999. In vivo protein transduction:delivery of a biologically active protein. Science 285:1569-1572.
[0580] 48. Derossi, D., G. Chassaing, and A. Prochiantz. 1998. Trojan peptides: the penetratin system for intracellular delivery. Trends Cell Biol. 8:84-87.
[0581] 49. Troy, C. M., D. Derossi, A. Prochiantz, L. A. Greene, and M. L. Shelanski. 1996. Downregulation of Cu/Zn superoxide dismutase leads to cell death via the nitric oxide-peroxynitrite pathway. J. Neurosci. 16:253-261.
[0582] 50. Allinquant, B., P. Hantraye, P. Mailleux, K. Moya, C. Bouillot, and A. Prochiantz. 1995. Downregulation of amyloid precursor protein inhibits neurite outgrowth in vitro. J. Cell Biol. 128:919-927.
[0583] 51. Futaki, S., T. Suzuki, W. Ohashi, T. Yagami, S. Tanaka, K. Ueda, and Y. Sugiura. 2001. Arginine-rich peptides. An abundant source of membrane-permeable peptides having potential as carriers for intracellular protein delivery. J. Biol. Chem. 276:5836-5840.
[0584] 52. Densmore, C. L., F. M. Orson, B. Xu, B. M. Kinsey, J. C. Waldrep, P. Hua, B. Bhogal, and V. Knight. 1999. Aerosol delivery of robust polyethyleneimine-DNA complexes for gene therapy and genetic immunization. Mol. Therapy 1:180-188.
[0585] 53. Arppe, J., M. Widgred, and J. C. Waldrep. 1998. Pulmonary pharmacokinetics of cyclosporin A liposomes. Intl. J. Pharm. 161:205-214.
[0586] 54. Griesenbach, U., A. chonn, R. Cassady, V. Hannam, C. Ackerley, M. Post, A. K. Transwell, K. Olek, H. O'Brodovich, and L.-C. Tsui. 1998. Comparison between intratracheal and intravenous administration of liposome-DNA complexes for cystic fibrosis lung gene therapy. Gene Ther. 5:181-188.
[0587] 55. Orson, F. M., L. Song, A. Gautam, C. L. DEnsmore, B. Bhogal, and B. M. Kinsey. 2002. Gene delivery to the lung using protein/polyethyleneimine/plasmid complexes. Gene Therapy 9:463-471.
[0588] 56. Gautam, A., C. L. Densmore, E. Golunski, B. Xu, and J. C. Waldrep. 2001. Transgene expression in mouse airway epithelium by aerosol gene therapy with PEI-DNA complexes. Mol. Therapy 3:551-556.
[0589] 57. Tabata, Y., and Y. Ikada. 1988. Effect of size and surface charge of polymer microspheres on their phagocytosis by macrophage. J. Biomed. Mater. Res. 22:837-842.
[0590] 58. Vanbever, R., J. D. Mintzes, J. Wang, J. Nice, D. chen, R. Batycky, L. R., and D. A. Edwards. 1999. Formulation and physical characterization of large porous particles for inhalation. Pharmaceutical Res. 16:1735-1742.
[0591] 59. McManus, M. T., C. P. Peterson, B. B. Haines, J. Chen, and P. A. Sharp. 2002. Gene silencing using micro-RNA designed hairpins. RNA 8:842-850.
[0592] 60. Myslinski, E., J. C. Ame, A. Krol, and P. Carbon. 2001. An unusually compact external promoter for RNA polymerase III transcription of the human H1 RNA gene. Nucleic Acids Res. 29:2502-2509.
[0593] 61. Brummelkamp, T. R., R. Bernards, and R. Agami. 2002. A system for stable expression of short interfering RNAs in mammalian cells. Science 296:550-553.
[0594] 62. Paddison, P. J., A. A. Caudy, E. Bernstein, G. J. Hannon, and D. S. Conklin. 2002. Short hairpin RNAs (shRNAs) induce sequence-sepcific silencing in mammalian cells. Genes Dev. 16:948-958.
[0595] 63. Gil, J., and M. Esteban. 2000. Induction of apoptosis by the dsRNA-dependent protein kinase (PKR): mechanism of action. Apoptosis 5:107-114.
[0596] 64. Bitko, V., and S. Barik. 2001. Phenotypic silencing of cytoplasmic genes using sequence-specific double-stranded short interfering RNA and its application in the reverse genetic of wild type negative-strand RNA viruses. BMC Microbiol. 1:34-43.
[0597] 65. Garcia-Sastre, A. (2002) Microbes & Inf. 4, 647-655.
[0598] 66. Katze, M. G., He, Y. & Gale Jr., M. (2002) Nature Rev. Immunol. 2, 675-687.
[0599] 67. Diaz, M. O., Ziemin, S., Le Beau, M. M., Pitha, P., Smith, S. D., Chilcote, R. R. & Rowley, J. D. (1988) Proc. Natl. Acad. Sci. USA 85, 5259-5263.
[0600] 68. Diaz, M. O., Pomykala, H. M., Bohlander, S. K., Maltepe, E., Malik, K., Brownstein, B. & Olopade, O. I. (1994) Genomics 22, 540-552.
[0601] 69. Kim, M.-J., Latham, A. G. & Krug, R. M. (2002) Proc. Natl. Acad. Sci. USA 99, 10096-10101.
[0602] 70. Medcalf, L., Poole, E., Elton, D. & Digard, P. (1999) J. Virol. 73, 7349-7356.
[0603] 71. Shapiro, G. I. & Krug, R. M. (1988) J. Virol. 62, 2285-2290.
[0604] 72. Beaton, A. R. & Krug, R. M. (1986) Proc. Natl. Acad. Sci. USA 83, 6282-6286
[0605] 73. Lois, C., E. J. Hong, S. Pease, E. J. Brown, and D. Baltimore. (2002) Science 295:868-872.
[0606] 74. Weiss, D. J., G. M. Mutlu, L. Bonneau, M. Mendez, Y. Wang, V. Dumasius, and P. Factor. (2002) Mol. Ther. 6:4349.
[0607] 75. Hansen, M. B., S. E. Nielsen, and K. Berg. (1989) J. Immunol. Methods 119:203-210.
[0608] 76. Kunath, K, von Harpe A, Fischer D, Petersen H, Bickel U, Voigt K, Kissel T. (2003) J Control Release 89(1):113-25.
[0609] 77. Jobe A. Surfactant treatment for respiratory distress syndrome. Respir Care 1986;31(6):467-476.
[0610] 78. Berry D. Neonatology in the 1990's: surfactant replacement therapy becomes a reality. Clin Pediatr 1991;30(3):167-170.
[0611] 79. Avery M E, Mead J. Surface properties in relation to atelectasis and hyaline membrane disease. Am J Dis Child 1959;97:517-523.
[0612] 80. von Neergard K. Neue Auffassungen Ober einen Grundbegriff der Atemmechanik: die Retraktionskraft der Lunge, äbhangig von der Oberflächenspannung in den Alveolen. Z Ges Exp Med 1929;66:373.
[0613] 81. Hallman M, Teramo K, Ylikorkala O, Merritt T A. Natural surfactant substitution in respiratory distress syndrome. J Perinat Med 1987;15:463-468.
[0614] 82. Bloom B T, Kattwinkel J, Hall R T, et al. Comparison of Infasurf (calf lung surfactant extract) to Survanta (beractant) in the treatment and prevention of respiratory distress syndrome. Pediatrics. 1997;100:31-38.
[0615] 83. Mizuno K, Ikegami M, Chen C-M, et al. Surfactant protein-B supplementation improves in vivo function of a modified natural surfactant. Pediatr Res. 1995;37:271-276.
[0616] 84. Hall S B, Venkitaraman A R, Whitsett J A, et al. Importance of hydrophobic apoproteins as constituents of clinical exogenous surfactants. Am Rev Respir Dis. 1992; 145:24-30.
[0617] 85. C. H. Ahn, S. Y. Chae, Y. H. Bae and S. W. Kim, Biodegradable poly(ethylenimine) for plasmid DNA delivery. J Control Release 80, 273-82, 2002.
[0618] 86. Kichler, A., Leborgne C, Coeytaux E, Danos O. Polyethylenimine-mediated gene delivery: a mechanistic study. J Gene Med. March-April 2001;3(2):135-44.
[0619] 87. Brissault B, Kichler A, Guis C, Leborgne C, Danos O, Cheradame H.Synthesis of linear polyethylenimine derivatives for DNA transfectionBioconjug Chem. May-June 2003;14(3):581-7
[0620] 88. Kichler A, Leborgne C, Marz J, Danos O, Bechinger B.Histidine-rich amphipathic peptide antibiotics promote efficient delivery of DNA into mammalian cellsProc Natl Acad Sci USA. Feb. 18, 2003;100(4):1564-8
[0621] 89. Brantl, S. (2002). Antisense-RNA regulation and RNA interference. Biochim Biophys Acta 1575, 15-25.
[0622] 90. Semizarov, D., Frost, L., Sarthy, A., Kroeger, P., Halbert, D. N., and Fesik, S. W. (2003). Specificity of short interfering RNA determined through gene expression signatures. Proc Natl Acad Sci USA 100, 6347-6352.
[0623] 91. Chi, J. T., Chang, H. Y., Wang, N. N., Chang, D. S., Dunphy, N., and Brown, P. O. (2003). Genomewide view of gene silencing by small interfering RNAs. Proc Natl Acad Sci USA 100, 6343-6346.
[0624] 92. Bitko, V., and Barik, S. (2001). Phenotypic silencing of cytoplasmic genes using sequence-specific double-stranded short interfering RNA and its application in the reverse genetics of wild type negative-strand RNA viruses. BMC Microbiol 1, 34.
[0625] 93. Anderson, D. G., Lynn, D. M., and Langer, R. (2003). Semi-Automated Synthesis and Screening of a Large Library of Degradable Cationic Polymers for Gene Delivery. Angew Chem Int Ed Engl 42, 3153-3158.
[0626] 94. Ge, Q., McManus, M., Nguyen, T., Shen, C.-H., Sharp, P. A., Eisen, H. N., and Chen, J. (2003). RNA interference of influenza virus production by directly targeting mRNA for degradation and indirectly inhibiting all viral RNA transcription. Proc Natl Acad Sci USA 100, 2718-2723.
[0627] 95. Kumar, M., and Carmichael, G. G. (1998). Antisense RNA: function and fate of duplex RNA in cells of higher eukaryotes. Microbiol Mol Biol Rev 62, 1415-1434.
[0628] 96. Lèuscher-Mattli, M. (2000). Influenza chemotherapy: a review of the present state of art and of new drugs in development. Arch Virol 145, 2233-2248.
[0629] 97. McCaffrey, A. P., Meuse, L., Pham, T. T., Conklin, D. S., Hannon, G. J., and Kay, M. A. (2002). RNA interference in adult mice. Nature 418, 38-39.
[0630] 98. McCaffrey, A. P., Nakai, H., Pandey, K., Huang, Z., Salazar, F. H., Xu, H., Wieland, S. F., Marion, P. L., and Kay, M. A. (2003). Inhibition of hepatitis B virus in mice by RNA interference. Nat Biotechnol 21, 639-644.
[0631] 99. Rubinson, D. A., Dillon, C. P., Kwiatkowski, A. V., Sievers, C., Yang, L., Kopinja, J., Rooney, D. L., Ihrig, M. M., McManus, M. T., Gertler, F. B., et al. (2003). A lentivirus-based system to functionally silence genes in primary mammalian cells, stem cells and transgenic mice by RNA interference. Nat Genet 33, 401-406.
[0632] 100. Shapiro, G. I., and Krug, R. M. (1988). Influenza virus RNA replication in vitro: synthesis of viral template RNAs and virion RNAs in the absence of an added primer. J Virol 62, 2285-2290.
[0633] 101. Shen, C., Buck, A. K., Liu, X., Winkler, M., and Reske, S. N. (2003). Gene silencing by adenovirus-delivered siRNA. FEBS lett 539, 111-114.
[0634] 102. Simeoni, F., Morris, M. C., Heitz, F., and Divita, G. (2003). Insight into the mechanism of the peptide-based gene delivery system MPG: implications for delivery of siRNA into mammalian cells. Nucleic Acids Res 31, 2717-2724.
[0635] 103. Soane, R. J., Frier, M., Perkins, A. C., Jones, N. S., Davis, S. S., and Illum, L. (1999). Evaluation of the clearance characteristics of bioadhesive systems in humans. Int J Pharm 178, 55-65.
[0636] 104. Stiver, G. (2003). The treatment of influenza with antiviral drugs. CMAJ 168, 49-56.
[0637] 105. Tachibana, R., Harashima, H., Ide, N., Ukitsu, S., Ohta, Y., Suzuki, N., Kikuchi, H., Shinohara, Y., and Kiwada, H. (2002). Quantitative analysis of correlation between number of nuclear plasmids and gene expression activity after transfection with cationic liposomes. Pharm Res 19, 377-381.
[0638] 106. Thomas, C. E., Ehrhardt, A., and Kay, M. A. (2003). Progress and problems with the use of viral vectors for gene therapy. Nat Rev Genet 4, 346-358.
[0639] 107. Xia, H., Mao, Q., Paulson, H. L., and Davidson, B. L. (2002). siRNA-mediated gene silencing in vitro and in vivo. Nat Biotechnol 20, 1006-1010.
[0640] 108. Zhang, G., Song, Y. K., and Liu, D. (2000). Long-term expression of human alpha1-antitrypsin gene in mouse liver achieved by intravenous administration of plasmid DNA using a hydrodynamics-based procedure. Gene Ther 7, 1344-1349
[0641] 109. Cheung, M., and Lieberman, J. M. (2002). Influenza: update on strategies for managment. Contemporay Pediatrics 19, 82-114.
[0642] 110. Yang, P., Althage, A., Chung, J., and Chisari, F. (2000) Hydrodynamic injection of viral DNA: A mouse model of acute hepatitis B virus infection, Proc. Natl. Acad. Sci., 99(21): 13825-13830.
[0643] 111. Zhang, G., Budker, V., Wolff, J A (1999) High levels of foreign gene expression in hepatocytes after tail vein injections of naked plasmid DNA, Hum Gene Ther, 10:1735-1737.
[0644] 112. Liu, F., Song, Y. K., Liu, D. (1999) Hydrodynamics-based transfection in animals by systemic administration of plasmid DNA. Gene Therapy; 6:1258-1266.
[0645] 113. Naldini, L. Lentiviruses as gene transfer agents for delivery to non-dividing cells. Curr Opin Biotechnol 9, 457-63 (1998).
[0646] 114. Naldini, L. et al. In vivo gene delivery and stable transduction of nondividing cells by a lentiviral vector. Science 272, 263-7 (1996).
[0647] 115. Miyoshi, H., Blomer, U., Takahashi, M., Gage, F. H. & Verma, I. M. Development of a self-inactivating lentivirus vector. J Virol 72, 8150-7 (1998).
[0648] 116. Pfeifer, A., Ikawa, M., Dayn, Y. & Verma, I. M. Transgenesis by lentiviral vectors: lack of gene silencing in mammalian embryonic stem cells and preimplantation embryos. Proc Natl Acad Sci USA 99, 2140-5 (2002).
[0649] 117. Lois, C., Hong, E. J., Pease, S., Brown, E. J. & Baltimore, D. Germline transmission and tissue-specific expression of transgenes delivered by lentiviral vectors. Science 295, 868-72 (2002).
[0650] 118. Anderson D G, Lynn D M, Langer R., Semi-Automated Synthesis and Screening of a Large Library of Degradable Cationic Polymers for Gene Delivery. Angew Chem Int Ed Engl. Jul. 14, 2003; 42(27):3153-3158.
[0651] 119. McCown, M., Diamond, M. S., and Pekosz, A., Virology, 313: 514-524 (2003).
[0652] 120. Gratton, J. P., Yu, J., Griffith, J. W., Babbitt, R. W., Scotland, R. S., Hickey, R., Giordano, F. J., and Sessa, W. C., Cell-permeable peptides improve cellular uptake and therapeutic gene delivery of replication-deficient viruses in cells and in vivo. Nat. Med., 9(3): 357-362 (2003).
[0653] 121. McKenzie, D. L., Kwok, K. Y., and Rice, K. G., A Potent New Class of Reductively Activated Peptide Gene Delivery Agents. J. Biol. Chem., 275(14): 9970-9977 (2000).
[0654] 122. Park, Y., Kwok, K. Y., Boukarim, C., and Rice, K. G., Synthesis of Sulfhydryl Cross-Linking Poly(Ethylene Glycol Peptides and Glycopeptides as Carriers for Gene Delivery. Bioconjugate Chem., 13: 232-239 (2002).
[0655] 123. Zhang, X., Sawyer, G., J., Dong, X., Qiu, Y., Collins, L., and Fabre, J. W. The in vivo use of chloroquine to promote non-viral gene delivery to the liver via the portal vein and bile duct. J. Gene Med., 5:209-218, 2003.
[0656] 124. Thomas, N., and Klibanov, A. M. Non-viral gene therapy: polycation-mediated DNA delivery. Appl. Microbiol. Biotechnol. 62:27-34 (2003).
[0657] 125. S.-O. Han, R. I. Mahato, Y. K. Sung, S. W. Kim, “Development of biomaterials for gene therapy”, Molecular Therapy 2:302317, 2000.
[0658] 126. Weiss, D., Delivery of Gene Transfer Vectors to the Lung: Obstacles and the Role of Adjunct Techniques for Airway Administration. Mol. Therapy 6(2) (2002).
[0659] 127. Ferrari S, Geddes D M, Alton E W. Barriers to and new approaches for gene therapy and gene delivery in cystic fibrosis,Adv Drug Deliv Rev, 54(11):1373-93 (2002).
[0660] 128. Orson F M, Song L, Gautam A, Densmore C L, Bhogal B S, Kinsey B M. Gene delivery to the lung using protein/polyethylenimine/plasmid complexes. Gene Ther. April 2002;9(7):463-71.
[0661] 129. Tiyaboonchai, W., Woiszwillo, J., and Middauth, C. R. Formulation and characterization of DNA-polyethylenemimine-dextran sulfate nanoparticles. Eur. J. Pharm. Sci. 19:191-202 (2003).
[0662] 130. Benns, J., Mahato, R., and Kim, S. W., Optimization of factors influencing the transfection efficiency of folate-PEG-folate-graft polyethyleneimine, J. Cont. Release 79:255-269 (2002).
[0663] 131. Putnam, D., Zelikin, A. N., Izumrudov, V. A., and Langer, R., Polyhistidine-PEG:DNA nanocomposites for gene delivery, Biomaterials 24: 4425-4433 (2003).
[0664] 132. Benns, J., Choi, J-S., Mahato, R. I., Park, J-H., and Kim, S. W., pH-Sensitive Cationic Polymer Gene Delivery Vehicle: N-Ac-poly(L-histidine)-graft-poly(L-lysine) Comb Shaped Polymer, Bioconj. Chem. 11:637-645 (2000).
[0665] 133. Panyam, J., Zhou, W-Z., Prabha, S., Sahoo, S. K., and Labhasetwar, V., Rapid endo-lysosomal escape of poly(DL-lactide-co-glycolide) nanoparticles: implications for drug and gene delivery, FASEB J., 16: 1217-1226 (2002).
[0666] 134. Lindgren, M., Hallbrink, M., Prochiantz, A., and Langel, U. Cell-penetrating peptides. Trends Pharmacol. Sci. 21:99-103 (2000).
[0667] 135. Morris, M. C., Depollier, J., Mery, J., Heitz, F., and Divita, G., A peptide carrier for the biologically active proteins into mammalian cells. Nat. Biotechnol. 19:1174-1176 (2001).
[0668] 136. Schwarze, S. R. and Dowdy, S. F. In vivo protein transduction: intracellular delivery of biologically active proteins, compounds, and DNA. Trends Pharmacol. Sci. 21:99-103 (2000).
[0669] 137. Amarzguioui, A., Holen, T., Babaie, E., and Prydz, H. Tolerance for mutations and chemical modifications in a siRNA. Nuc. Acids. Res. 31(2): 589-595 (2003).
[0670] 138. Braasch, D. A., Jensen, S., Liu, Y., Kaur, K., Arar, K., White, M. A., and Corey, D. R>RNA Interference in Mammalian Cells by Chemically Modified RNA. Biochemistry 42: 7967-7975 (2003).
[0671] 139. Chiu, Y-L. and Rana, T. M. siRNA function in RNAi: A chemical modification analysis. RNA 9(9): 1034-1048 (2003).
[0672] 140. Satishchandran C. Characterization of a new class of DNA delivery complexe formed by the local anesthetic bupivacaine. Biochimica et Biophysica Acta 1468: 20-30 (2000).
[0673] 141. Jeong J H, Park T G., Poly(L-lysine)-g-poly(D,L-lactic-co-glycolic acid) micelles for low cytotoxic biodegradable gene delivery carriers. J Control Release, 82(1):159-66 (2002)
[0674] 142. Loakes, D. and Brown, D. M., Nucl. Acids Res. 22:4039-4043 (1994).
[0675] 143. Ohtsuka, E. et al., J. Biol. Chem. 260(5):2605-2608 (1985).
[0676] 144. Lin, P. K. T. and Brown, D. M., Nucleic Acids Res. 20(19):5149-5152 (1992).
[0677] 145. Nichols, R. et al., Nature 369(6480): 492-493 (1994).
[0678] 146. Rahmon, M. S. and Humayun, N. Z., Mutation Research 377 (2): 263-8 (1997).
[0679] 147. Amosova, O., et al., Nucleic Acids Res. 25 (10): 1930-1934 (1997).
[0680] 148. Loakes D. & Brown, D. M., Nucleic Acids Res. 22 (20): 4039-4043 (1994).
[0681] 149. Loakes, D., Nucleic Acids Res. 29(12):2437-47 (2001).
[0682] 150. Das, A. and Niven, R. J. Pharm. Sci., 90(9), 1366 (2001).
[0683] 151. Okuda, K, et al, Vaccine 19:3681-3691, (2001).
[0684] 152. Han, S.-O, et al, Molecular Therapy 2:302317, (2000.)
[0685] 153. Lewis, D L, et al., Nat Genet. 32(1):107-8 (2002).

The application's sequence listing, which the Patent Office published only in electronic form, follows.

SEQUENCE LISTING (2926 sequences)

SEQ ID NO: 1 - DNA, 21 bp, Artificial
  Influenza virus type A PB2 segment
aatcaagaagtacacatcagg

SEQ ID NO: 2 - DNA, 21 bp, Artificial
  Influenza virus type A PB2 segment
aagtacacatcaggaagacag

SEQ ID NO: 3 - DNA, 21 bp, Artificial
  Influenza virus type A PB2 segment
aatggatgatggcaatgaaat

SEQ ID NO: 4 - DNA, 21 bp, Artificial
  Influenza virus type A PB2 segment
aattacagcagacaagaggat

SEQ ID NO: 5 - DNA, 21 bp, Artificial
  Influenza virus type A PB2 segment
aacttactcatcgtcaatgat

SEQ ID NO: 6 - DNA, 21 bp, Artificial
  Influenza virus type A PB2 segment
aatgtgaggggatcaggaatg

SEQ ID NO: 7 - DNA, 21 bp, Artificial
  Influenza virus type A PB2 segment
aagcatcaatgaactgagcaa

SEQ ID NO: 8 - DNA, 21 bp, Artificial
  Influenza virus type A PB2 segment
aaggagacgtggtgttggtaa

SEQ ID NO: 9 - DNA, 21 bp, Artificial
  Influenza virus type A PB2 segment
aacgggactctagcatactta

SEQ ID NO: 10 - DNA, 21 bp, Artificial
  Influenza virus type A PB2 segment
aagaattcggatggccatcaa

SEQ ID NO: 11 - DNA, 21 bp, Artificial
  Influenza virus type A PB1 segment
aagcaggcaaaccatttgaat

SEQ ID NO: 12 - DNA, 21 bp, Artificial
  Influenza virus type A PB1 segment
aaccatttgaatggatgtcaa

SEQ ID NO: 13 - DNA, 21 bp, Artificial
  Influenza virus type A PB1 segment
aatccgaccttacttttctta

SEQ ID NO: 14 - DNA, 21 bp, Artificial
  Influenza virus type A PB1 segment
aagtgccagcacaaaatgcta

SEQ ID NO: 15 - DNA, 21 bp, Artificial
  Influenza virus type A PB1 segment
aacaggatacaccatggatac

SEQ ID NO: 16 - DNA, 21 bp, Artificial
  Influenza virus type A PB1 segment
aatgttctcaaacaaaatggc

SEQ ID NO: 17 - DNA, 21 bp, Artificial
  Influenza virus type A PB1 segment
aatgatgatgggcatgttcaa

SEQ ID NO: 18 - DNA, 21 bp, Artificial
  Influenza virus type A PB1 segment
aagatctgttccaccattgaa

SEQ ID NO: 19 - DNA, 21 bp, Artificial
  Influenza virus type A PA segment
aagcaggtactgatccaaaat

SEQ ID NO: 20 - DNA, 21 bp, Artificial
  Influenza virus type A PA segment
aatggaagattttgtgcgaca

SEQ ID NO: 21 - DNA, 21 bp, Artificial
  Influenza virus type A PA segment
ttgtgcgacaatgcttcaatc

SEQ ID NO: 22 - DNA, 21 bp, Artificial
  Influenza virus type A PA segment
aatgcttcaatccgatgattg

SEQ ID NO: 23 - DNA, 21 bp, Artificial
  Influenza virus type A PA segment
aatccgatgattgtcgagctt

SEQ ID NO: 24 - DNA, 21 bp, Artificial
  Influenza virus type A PA segment
aacaaatttgcagcaatatgc

SEQ ID NO: 25 - DNA, 21 bp, Artificial
  Influenza virus type A PA segment
aagagacaattgaagaaaggt

SEQ ID NO: 26 - DNA, 21 bp, Artificial
  Influenza virus type A PA segment
tagagcctatgtggatggatt

SEQ ID NO: 27 - DNA, 21 bp, Artificial
  Influenza virus type A PA segment
aacggctacattgagggcaag

SEQ ID NO: 28 - DNA, 21 bp, Artificial
  Influenza virus type A PA segment
aaccacacgaaaagggaataa

SEQ ID NO: 29 - DNA, 21 bp, Artificial
  Influenza virus type A PA segment
aacctgggacctttgatcttg

SEQ ID NO: 30 - DNA, 21 bp, Artificial
  Influenza virus type A PA segment A/WSN/33HIN1) strain
aagcaattgaggagtgcctga

SEQ ID NO: 31 - DNA, 21 bp, Artificial
  Influenza virus type A PA segment
aatgatccctgggttttgctt

SEQ ID NO: 32 - DNA, 21 bp, Artificial
  Influenza virus type A PA segment
aatgcttcttggttcaactcc

SEQ ID NO: 33 - DNA, 21 bp, Artificial
  Influenza virus type A HA segment
ttggagccattgccggtttta

SEQ ID NO: 34 - DNA, 21 bp, Artificial
  Influenza virus type A HA segment
ggagccattgccggttttatt

SEQ ID NO: 35 - DNA, 21 bp, Artificial
  Influenza virus type A HA segment
aatgggacttatgattatccc

SEQ ID NO: 36 - DNA, 21 bp, Artificial
  Influenza virus type A NP segment
aatcactcactgagtgacatc

SEQ ID NO: 37 - DNA, 21 bp, Artificial
  Influenza virus type A NP segment
aatcatggcgtcccaaggcac

SEQ ID NO: 38 - DNA, 21 bp, Artificial
  Influenza virus type A NP segment
aatagagagaatggtgctctc

SEQ ID NO: 39 - DNA, 21 bp, Artificial
  Influenza virus type A NP segment
aataaggcgaatctggcgcca

SEQ ID NO: 40 - DNA, 21 bp, Artificial
  Influenza virus type A NP segment
aaggcgaatctggcgccaagc

SEQ ID NO: 41 - DNA, 21 bp, Artificial
  Influenza virus type A NP segment
aatgtgcaacattctcaaagg

SEQ ID NO: 42 - DNA, 21 bp, Artificial
  Influenza virus type A NP segment
aatgaaggatcttatttcttc

SEQ ID NO: 43 - DNA, 21 bp, Artificial
  Influenza virus type A NP segment
aaggatcttatttcttcggag

SEQ ID NO: 44 - DNA, 21 bp, Artificial
  Influenza virus type A NP segment
aatgcagaggagtacgacaat

SEQ ID NO: 45 - DNA, 21 bp, Artificial
  Influenza virus type A NA segment
aatgaatccaaatcagaaaat

SEQ ID NO: 46 - DNA, 21 bp, Artificial
  Influenza virus NA segment
gaggacacaagagtctgaatg

SEQ ID NO: 47 - DNA, 21 bp, Artificial
  Influenza virus NA segment
gaggaatgttcctgttaccct

SEQ ID NO: 48 - DNA, 21 bp, Artificial
  Influenza virus type A NA segment
gtgtgtgcagagacaattggc

SEQ ID NO: 49 - DNA, 21 bp, Artificial
  Influenza M segment
aatggctaaagacaagaccaa

SEQ ID NO: 50 - DNA, 21 bp, Artificial
  Influenza virus type A M segment
aatcctgtcacctctgactaa

SEQ ID NO: 51 - DNA, 21 bp, Artificial
  Influenza virus type A M segment
acgctcaccgtgcccagtgag

SEQ ID NO: 52 - DNA, 21 bp, Artificial
  Influenza virus type A NA segment
actgcagcgtagacgctttgt

SEQ ID NO: 53 - DNA, 22 bp, Artificial
  Influenza virus type A M segment
aactcagttattctgctggtgc

SEQ ID NO: 54 - DNA, 21 bp, Artificial
  Influenza virus type A M segment
agttattctgctggtgcactt

SEQ ID NO: 55 - DNA, 21 bp, Artificial
  Influenza virus type A M segment
aacagattgctgactcccagc

SEQ ID NO: 56 - DNA, 21 bp, Artificial
  Influenza virus type A M segment
aaggctatggagcaaatggct

SEQ ID NO: 57 - DNA, 21 bp, Artificial
  Influenza virus type A M segment
aatggctggatcgagtgagca

SEQ ID NO: 58 - DNA, 21 bp, Artificial
  Influenza virus type A M segment
actcatcctagctccagtgct

SEQ ID NO: 59 - DNA, 21 bp, Artificial
  Influenza virus type A M segment
aatttgcaggcctatcagaaa

SEQ ID NO: 60 - DNA, 21 bp, Artificial
  Influenza virus type A M segment
attgtggattcttgatcgtct

SEQ ID NO: 61 - DNA, 21 bp, Artificial
  Influenza virus type A M segment
aagaatatcgaaaggaacagc

SEQ ID NO: 62 - DNA, 21 bp, Artificial
  Influenza virus type A M segment
attttgtcagcatagagctgg

SEQ ID NO: 63 - DNA, 21 bp, Artificial
  Influenza NS segment
aagaactaggtgatgccccat

SEQ ID NO: 64 - DNA, 21 bp, Artificial
  Influenza virus type A NS segment
aactaggtgatgccccattcc

SEQ ID NO: 65 - DNA, 21 bp, Artificial
  Influenza virus type A NS segment
atcggcttcgccgagatcaga

SEQ ID NO: 66 - DNA, 21 bp, Artificial
  Influenza virus type A NS segment
gccgagatcagaaatccctaa

SEQ ID NO: 67 - DNA, 21 bp, Artificial
  Influenza virus type A NS segment
ggagtcctcatcggaggactt

SEQ ID NO: 68 - DNA, 21 bp, Artificial
  Influenza virus type A NS segment
aatgataacacagttcgagtc

SEQ ID NO: 69 - DNA, 23 bp, Artificial
  Targeted to influenza virus type A PB2 segment
ggagacgugguguugguaadtdt

SEQ ID NO: 70 - DNA, 23 bp, Artificial
  Targeted to influenza virus type A PB2 segment
uuaccaacaccacgucuccdtdt

SEQ ID NO: 71 - DNA, 23 bp, Artificial
  Targeted to influenza virus type A PB2 segment
cgggacucuagcauacuuadtdt

SEQ ID NO: 72 - DNA, 23 bp, Artificial
  Targeted to influenza virus type A PB2 segment
uaaguaugcuagagucccgdtdt

SEQ ID NO: 73 - DNA, 23 bp, Artificial
  Targeted to influenza virus type A PB1 segment
gcaggcaaaccauuugaaudtdt

SEQ ID NO: 74 - DNA, 23 bp, Artificial
  Targeted to influenza virus type A PB1 segment
auucaaaugguuugccugcdtdt

SEQ ID NO: 75 - DNA, 23 bp, Artificial
  Targeted to influenza virus type A PB1 segment
caggauacaccauggauacdtdt

SEQ ID NO: 76 - DNA, 23 bp, Artificial
  Targeted to influenza virus type A PB1 segment
guauccaugguguauccugdtdt

SEQ ID NO: 77 - DNA, 23 bp, Artificial
  Targeted to influenza virus type A PB1 segment
gaucuguuccaccauugaadtdt

SEQ ID NO: 78 - DNA, 23 bp, Artificial
  Targeted to influenza virus type A PB1 segment
uucaaugguggaacagaucdtdt

SEQ ID NO: 79 - DNA, 23 bp, Artificial
  Targeted to influenza virus type A PA segment
ugcuucaauccgaugauugdtdt

SEQ ID NO: 80 - DNA, 23 bp, Artificial
  Targeted to influenza virus type A PA segment
caaucaucggauugaagcadtdt

SEQ ID NO: 81 - DNA, 23 bp, Artificial
  Targeted to influenza virus type A PA segment
cggcuacauugagggcaagdtdt

SEQ ID NO: 82 - DNA, 23 bp, Artificial
  Targeted to influenza virus type A PA segment
cuugcccucaauguagccgdtdt

SEQ ID NO: 83 - DNA, 23 bp, Artificial
  Targeted to influenza virus type A PA segment
gcaauugaggagugccugadtdt

SEQ ID NO: 84 - DNA, 23 bp, Artificial
  Targeted to influenza virus type A PA segment
ucaggcacuccucaauugcdtdt

SEQ ID NO: 85 - DNA, 23 bp, Artificial
  Targeted to influenza virus type A PA segment
ugaucccuggguuuugcuudtdt

SEQ ID NO: 86 - DNA, 23 bp, Artificial
  Targeted to influenza virus type A PA segment
aagcaaaacccagggaucadtdt

SEQ ID NO: 87 - DNA, 23 bp, Artificial
  Targeted to influenza virus type A PA segment
ugcuucuugguucaacuccdtdt

SEQ ID NO: 88 - DNA, 23 bp, Artificial
  Targeted to influenza virus type A PA segment
ggaguugaaccaagaagcadtdt

SEQ ID NO: 89 - DNA, 23 bp, Artificial
  Targeted to influenza virus type A NP segment
uagagagaauggugcucucdtdt

SEQ ID NO: 90 - DNA, 23 bp, Artificial
  Targeted to influenza virus type A NP segment
gagagcaccauucucucuadtdt

SEQ ID NO: 91 - DNA, 23 bp, Artificial
  Targeted to influenza virus type A NP segment
uaaggcgaaucuggcgccadtdt

SEQ ID NO: 92 - DNA, 23 bp, Artificial
  Targeted to influenza virus type A NP segment
uggcgccagauucgccuuadtdt

SEQ ID NO: 93 - DNA, 23 bp, Artificial
  Targeted to influenza virus type A NP segment
ggaucuuauuucuucggagdtdt

SEQ ID NO: 94 - DNA, 23 bp, Artificial
  Targeted to influenza virus type A NP segment
cuccgaagaaauaagauccdtdt

SEQ ID NO: 95 - DNA, 23 bp, Artificial
  Targeted to influenza type A M segment
ccgaggucgaaacguacgudtdt

SEQ ID NO: 96 - DNA, 23 bp, Artificial
  Targeted to influenza virus type A M segment
acguacguuucgaccucggdtdt

SEQ ID NO: 97 - DNA, 23 bp, Artificial
  Targeted to influenza virus type A M segment
cagauugcugacucccagcdtdt

SEQ ID NO: 98 - DNA, 23 bp, Artificial
  Targeted to influenza virus type A M segment
gcugggagucagcaaucugdtdt

SEQ ID NO: 99 - DNA, 23 bp, Artificial
  Targeted to influenza virus type A M segment
uggcuggaucgagugagcadtdt

SEQ ID NO: 100 - DNA, 23 bp, Artificial
  Targeted to influenza virus type A M segment
ugcucacucgauccagccadtdt

SEQ ID NO: 101 - DNA, 23 bp, Artificial
  Targeted to influenza virus type A M segment
gaauaucgaaaggaacagcdtdt

SEQ ID NO: 102 - DNA, 23 bp, Artificial
  Targeted to influenza virus type A M segment
gcuguuccuuucgauauucdtdt

SEQ ID NO: 103 - DNA, 23 bp, Artificial
  Targeted to influenza virus type A NS segment
cggcuucgccgagaucagadadt

SEQ ID NO: 104 - DNA, 23 bp, Artificial
  Targeted to influenza virus type A NS segment
ucugaucucggcgaagccgdadt

SEQ ID NO: 105 - DNA, 23 bp, Artificial
  Targeted to influenza virus type A NS segment
guccuccgaugaggacuccdtdt

SEQ ID NO: 106 - DNA, 23 bp, Artificial
  Targeted to influenza virus type A NS segment
ggaguccucaucggaggacdtdt

SEQ ID NO: 107 - DNA, 23 bp, Artificial
  Targeted to influenza virus type A NS segment
ugauaacacaguucgagucdtdt

SEQ ID NO: 108 - DNA, 23 bp, Artificial
  Targeted to influenza virus type A NS segment
gacucgaacuguguuaucadtdt

SEQ ID NO: 109 - DNA, 21 bp, Artificial
  Aequoria victoria green fluorescent protein
ggcuacguccaggagcgcauu

SEQ ID NO: 110 - DNA, 21 bp, Artificial
  Aequoria victoria green fluorescent protein
ugcgcuccuggacguagccuu

SEQ ID NO: 111 - DNA, 18 bp, Artificial
  mRNA
tttttttttttttttttt

SEQ ID NO: 112 - DNA, 22 bp, Artificial
  Influenza virus type A NP v RNA
ctcgtcgcttatgacaaagaag

SEQ ID NO: 113 - DNA, 36 bp, Artificial
  Influenza virus type A NP cRNA
atatcgtctcgtattagtagaaacaagggtattttt

SEQ ID NO: 114 - DNA, 21 bp, Artificial
  Influenza virus type A NS vRNA
caggacatactgatgaggatg

SEQ ID NO: 115 - DNA, 35 bp, Artificial
  Influenza virus type A NS cRNA
atatcgtctcgtattagtagaaacaagggtgtttt

SEQ ID NO: 116 - DNA, 22 bp, Artificial
  Influenza virus type A NP RNA
ctcgtcgcttatgacaaagaag

SEQ ID NO: 117 - DNA, 21 bp, Artificial
  Influenza virus type A NP RNA
agatcatcatgtgagtcagac

SEQ ID NO: 118 - DNA, 21 bp, Artificial
  Influenza virus type A NS RNA
caggacatactgatgaggatg

SEQ ID NO: 119 - DNA, 21 bp, Artificial
  Influenza virus type A NS RNA
gtttcagagactcgaactgtg

SEQ ID NO: 120 - DNA, 24 bp, Artificial
  Influenza virus type A M vRNA
cgctcagacatgagaacagaatgg

SEQ ID NO: 121 - DNA, 36 bp, Artificial
  Influenza virus type A M cRNA
atatcgtctcgtattagtagaaacaaggtagttttt

SEQ ID NO: 122 - DNA, 24 bp, Artificial
  Influenza virus type A M RNA
cgctcagacatgagaacagaatgg

SEQ ID NO: 123 - DNA, 23 bp, Artificial
  Influenza virus type A M RNA
taactagcctgactagcaacctc

SEQ ID NO: 124 - DNA, 25 bp, Artificial
  Influenza virus type A PB1 vRNA
gtgcagaaatcagcccgaatggttc

SEQ ID NO: 125 - DNA, 33 bp, Artificial
  Influenza virus type A PB1 cRNA
atatcgtctcgtattagtagaaacaaggcattt

SEQ ID NO: 126 - DNA, 24 bp, Artificial
  Influenza virus type A PB2 vRNA
gcgaaaggagagaaggctaatgtg

SEQ ID NO: 127 - DNA, 34 bp, Artificial
  Influenza virus type A PB2 cRNA
atatggtctcgtattagtagaaacaaggtcgttt

SEQ ID NO: 128 - DNA, 25 bp, Artificial
  Influenza virus type A PA vRNA
gcttcttatcgttcaggctcttagg

SEQ ID NO: 129 - DNA, 33 bp, Artificial
  Influenza virus type A PA cRNA
atatcgtctcgtattagtagaaacaaggtactt

SEQ ID NO: 130 - DNA, 24 bp, Artificial
  Influenza virus type A PB 1 RNA
cggattgatgcacggattgatttc

SEQ ID NO: 131 - DNA, 27 bp, Artificial
  Influenza virus type A PB 1 RNA
gacgtctgagctcttcaatggtggaac

SEQ ID NO: 132 - DNA, 24 bp, Artificial
  Influenza virus type A PB2 RNA
gcgaaaggagagaaggctaatgtg

SEQ ID NO: 133 - DNA, 24 bp, Artificial
  Influenza virus type A PB2 RNA
aatcgctgtctggctgtcagtaag

SEQ ID NO: 134 - DNA, 25 bp, Artificial
  Influenza virus type A PA RNA
gcttcttatcgttcaggctcttagg

SEQ ID NO: 135 - DNA, 25 bp, Artificial
  Influenza virus type A PA RNA
ccgagaagcattaagcaaaacccag

SEQ ID NO: 136 - DNA, 20 bp, Artificial
  Gamma action
tctgtcagggttggaaagtc

SEQ ID NO: 137 - DNA, 20 bp, Artificial
  Gamma action
aaatgcaaaccgcttccaac

SEQ ID NO: 138 - DNA, 57 bp, Artificial
  Oligenucleotide for plasmid construction
tggatcttatttcttcggagattcaagagatctccgaagaaataagatccttttttc

SEQ ID NO: 139 - DNA, 61 bp, Artificial
  Oligenucleotide for plasmid construction
tcgagaaaaaaggatcttatttcttcggagatctcttgaatctccgaagaaataagatcca

SEQ ID NO: 140 - DNA, 55 bp, Artificial
  Oligenucleotide for plasmid construction
tgatctgttccaccattgaattcaagagattcaatggtggaacagatcttttttc

SEQ ID NO: 141 - DNA, 59 bp, Artificial
  Oligenucleotide for plasmid construction
tcgagaaaaaagatctgttccaccattgaatctcttgaattcaatggtggaacagatca

SEQ ID NO: 142 - DNA, 56 bp, Artificial
  Oligenucleotide for plasmid construction
tgcgataatataactgcaagattcaagagatcttgcagttatattatcgttttttc

SEQ ID NO: 143 - DNA, 55 bp, Artificial
  Oligenucleotide for plasmid construction
tcgagaaaaaacgataatataactgcaagatctcttgaatcttgcagttatatta

SEQ ID NO: 144 - DNA, 19 bp, Artificial
  Respiratory syncitial virus siRNA
cgataatataactgcaaga

SEQ ID NO: 145 - DNA, 19 bp, Artificial
  Respiratory syncitial virus siRNA
tcttgcagttatattatcg

SEQ ID NO: 146 - DNA, 55 bp, Artificial
  Oligenucleotide for plasmid construction
tgcaattgaggagtgcctgattcaagagatcaggcactcctcaattgcttttttc

SEQ ID NO: 147 - DNA, 23 bp, Artificial
  Targeted to influenza virus type A PB2 segment
gaaagcaggucaauuauaudtdt

SEQ ID NO: 148 - DNA, 23 bp, Artificial
  Targeted to influenza virus type A PB2 segment
auauaauugaccugcuuucdtdt

SEQ ID NO: 149 - DNA, 23 bp, Artificial
  Targeted to influenza virus type A PB2 segment
gucaauuauauucaauaugdtdt

SEQ ID NO: 150 - DNA, 23 bp, Artificial
  Targeted to influenza virus type A PB2 segment
cauauugaauauaauugacdtdt

SEQ ID NO: 151 - DNA, 23 bp, Artificial
  Targeted to influenza virus type A PB2 segment
cucgcacccgcgagauacudtdt

SEQ ID NO: 152 - DNA, 23 bp, Artificial
  Targeted to influenza virus type A PB2 segment
aguaucucgcgggugcgagdtdt

SEQ ID NO: 153 - DNA, 23 bp, Artificial
  Targeted to influenza virus type A PB2 segment
auaaucaagaaguacacaudtdt

SEQ ID NO: 154 - DNA, 23 bp, Artificial
  Targeted to influenza virus type A PB2 segment
auguguacuucuugauuaudtdt

SEQ ID NO: 155 - DNA, 23 bp, Artificial
  Targeted to influenza virus type A PB 2 segment
ugaaauggaugauggcaaudtdt

SEQ ID NO: 156 - DNA, 23 bp, Artificial
  Artificial sequence
auugccaucauccauuucadtdt

SEQ ID NO: 157 - DNA, 23 bp, Artificial
  Targeted to influenza virus type A PB2 segment
cuggucaugcagaucucagdtdt

SEQ ID NO: 158 - DNA, 23 bp, Artificial
  Targeted to influenza virus type A PB2 segment
cugagaucugcaugaccagdtdt

SEQ ID NO: 159 - DNA, 23 bp, Artificial
  Targeted to influenza virus type A PB2 segment
uaugcaaggcugcaaugggdtdt

SEQ ID NO: 160 - DNA, 23 bp, Artificial
  Targeted to influenza virus type A PB2 segment
cccauugcagccuugcauadtdt

SEQ ID NO: 161 - DNA, 23 bp, Artificial
  Targeted to influenza virus type A PB2 segment
caucgucaaugaugugggadtdt

SEQ ID NO: 162 - DNA, 23 bp, Artificial
  Targeted to influenza virus type A PB2 segment
ucccacaucauugacgaugdtdt

SEQ ID NO: 163 - DNA, 23 bp, Artificial
  Influenza virus type A PB1 segment
aaauaccugcagaaaugcudtdt

SEQ ID NO: 164 - DNA, 23 bp, Artificial
  Influenza virus type A PB1 segment
agcauuucugcagguauuudtdt

SEQ ID NO: 165 - DNA, 23 bp, Artificial
  Influenza virus type A PB1 segment
aacaauaugauaaacaaugdtdt

SEQ ID NO: 166 - DNA, 23 bp, Artificial
  Influenza virus type A PB1 segment
cauuguuuaucauauuguudtdt

SEQ ID NO: 167 - DNA, 23 bp, Artificial
  Influenza virus type A PA segment
cgaaagcagguacugauccdtdt

SEQ ID NO: 168 - DNA, 23 bp, Artificial
  Influenza virus type A PA segment
ggaucaguaccugcuuucgdtdt

SEQ ID NO: 169 - DNA, 23 bp, Artificial
  Influenza virus type A PA segment
aggcuauucaccauaagacdtdt

SEQ ID NO: 170 - DNA, 23 bp, Artificial
  Influenza virus type A PA segment
gucuuauggugaauagccudtdt

SEQ ID NO: 171 - DNA, 23 bp, Artificial
  Influenza virus type A PA segment
gggauuccuuucgucagucdtdt

SEQ ID NO: 172 - DNA, 23 bp, Artificial
  Influenza virus type A PA segment
gacugacgaaaggaaucccdtdt

SEQ ID NO: 173 - DNA, 23 bp, Artificial
  Influenza virus type A PA segment
gcaucuugugcagcaauggdtdt

SEQ ID NO: 174 - DNA, 23 bp, Artificial
  Influenza virus type A PA segment
ccauugcugcacaagaugcdtdt

SEQ ID NO: 175 - DNA, 23 bp, Artificial
  Influenza virus type A PA segment
guuguggcagugcuacuaudtdt

SEQ ID NO: 176 - DNA, 23 bp, Artificial
  Influenza virus type A PA segment
auaguagcacugccacaacdtdt

SEQ ID NO: 177 - DNA, 23 bp, Artificial
  Influenza virus type A PA segment
uacuauuugcuauccauacdtdt

SEQ ID NO: 178 - DNA, 23 bp, Artificial
  Influenza virus type A PA segment
guauggauagcaaauaguadtdt

SEQ ID NO: 179 - DNA, 23 bp, Artificial
  Influenza virus type A NP segment
uagauaaucacucacugagdtdt

SEQ ID NO: 180 - DNA, 23 bp, Artificial
  Influenza virus type A NP segment
cucagugagugauuaucuadtdt

SEQ ID NO: 181 - DNA, 23 bp, Artificial
  Influenza virus type A NP segment
cgucccaaggcaccaaacgdtdt

SEQ ID NO: 182 - DNA, 23 bp, Artificial
  Influenza virus type A NP segment
cguuuggugccuugggacgdtdt

SEQ ID NO: 183 - DNA, 23 bp, Artificial
  Influenza virus type A NP segment
auuucuucggagacaaugcdtdt

SEQ ID NO: 184 - DNA, 23 bp, Artificial
  Influenza virus type A NP segment
gcauugucuccgaagaaaudtdt

SEQ ID NO: 185 - DNA, 23 bp, Artificial
  Influenza virus type A NP segment
ugcagaggaguacgacaaudtdt

SEQ ID NO: 186 - DNA, 23 bp, Artificial
  Influenza virus type A NP segment
auugucguacuccucugcadtdt

SEQ ID NO: 187 - DNA, 23 bp, Artificial
  Influenza virus type A NP segment
gagtaatgaaggatcttatdtdt

SEQ ID NO: 188 - DNA, 23 bp, Artificial
  Influenza virus type A NP segment
ataagatccttcattactcdtdt

SEQ ID NO: 189 - DNA, 23 bp, Artificial
  Influenza virus type A M segment
cgaaagcagguagauauugdtdt

SEQ ID NO: 190 - DNA, 23 bp, Artificial
  Influenza virus type A M segment
caauaucuaccugcuuucgdtdt

SEQ ID NO: 191 - DNA, 23 bp, Artificial
  Influenza virus type A M segment
uagauauugaaagaugagudtdt

SEQ ID NO: 192 - DNA, 23 bp, Artificial
  Influenza virus type A M segment
acucaucuuucaauaucuadtdt

SEQ ID NO: 193 - DNA, 23 bp, Artificial
  Influenza virus type A M segment
ucauggaauggcuaaagacdtdt

SEQ ID NO: 194 - DNA, 23 bp, Artificial
  Influenza virus type A M segment
gucuuuagccauuccaugadtdt

SEQ ID NO: 195 - DNA, 23 bp, Artificial
  Influenza virus type A M segment
accaauccugucaccucugdtdt

SEQ ID NO: 196 - DNA, 23 bp, Artificial
  Influenza virus type A M segment
cagaggugacaggauuggudtdt

SEQ ID NO: 197 - DNA, 23 bp, Artificial
  Influenza virus type A M segment
uguguucacgcucaccgugdtdt

SEQ ID NO: 198 - DNA, 23 bp, Artificial
  Influenza virus type A M segment
cacggugagcgugaacacadtdt

SEQ ID NO: 199 - DNA, 23 bp, Artificial
  Influenza virus type A M segment
cagugagcgaggacugcagdtdt

SEQ ID NO: 200 - DNA, 23 bp, Artificial
  Influenza virus type A M segment
cugcaguccucgcucacugdtdt

SEQ ID NO: 201 - DNA, 23 bp, Artificial
  Influenza virus type A M segment
gacgcuuuguccaaaaugcdtdt

SEQ ID NO: 202 - DNA, 23 bp, Artificial
  Influenza virus type A M segment
gcauuuuggacaaagcgucdtdt

SEQ ID NO: 203 - DNA, 23 bp, Artificial
  Influenza virus type A M segment
gucaggcuaggcaaauggudtdt

SEQ ID NO: 204 - DNA, 23 bp, Artificial
  Influenza virus type A M segment
accauuugccuagccugacdtdt

SEQ ID NO: 205 - DNA, 23 bp, Artificial
  Influenza virus type A M segment
uucuugaaaauuugcaggcdtdt

SEQ ID NO: 206 - DNA, 23 bp, Artificial
  Influenza virus type A M segment
gccugcaaauuuucaagaadtdt

SEQ ID NO: 207 - DNA, 23 bp, Artificial
  Influenza virus type A M segment
ucauugggaucuugcacuudtdt

SEQ ID NO: 208 - DNA, 23 bp, Artificial
  Influenza virus type A M segment
aagugcaagaucccaaugadtdt

SEQ ID NO: 209 - DNA, 23 bp, Artificial
  Influenza virus type A M segment
uguggauucuugaucgucudtdt

SEQ ID NO: 210 - DNA, 23 bp, Artificial
  Influenza virus type A M segment
agacgaucaagaauccacadtdt

SEQ ID NO: 211 - DNA, 23 bp, Artificial
  Influenza virus type A M segment
ugucagcauagagcuggagdtdt

SEQ ID NO: 212 - DNA, 23 bp, Artificial
  Influenza virus type A M segment
cuccagcucuaugcugacadtdt

SEQ ID NO: 213 - DNA, 23 bp, Artificial
  Influenza virus type A M segment
gtcgaaacgcctatcagaadtdt

SEQ ID NO: 214 - DNA, 23 bp, Artificial
  Influenza virus type A M segment
uucugauaggcguuucgacdtdt

SEQ ID NO: 215 - DNA, 23 bp, Artificial
  Influenza virus type A M segment
aaaagcagggugacaaagadtdt

SEQ ID NO: 216 - DNA, 23 bp, Artificial
  Targeted to influenza virus type A NS segment
ucuuugucacccugcuuuudtdt

SEQ ID NO: 217 - DNA, 23 bp, Artificial
  Targeted to influenza virus type A NS segment
gcagggugacaaagacauadtdt

SEQ ID NO: 218 - DNA, 23 bp, Artificial
  Targeted to influenza virus type NS segment
uaugucuuugucacccugcdtdt

SEQ ID NO: 219 - DNA, 23 bp, Artificial
  Targeted to influenza virus type A NS segment
ggaugucaaaaaugcaguudtdt

SEQ ID NO: 220 - DNA, 23 bp, Artificial
  Targeted to influenza virus type A NS segment
aacugcauuuuugacauccdtdt

SEQ ID NO: 221 - DNA, 23 bp, Artificial
  Targeted to influenza virus type A NS segment
agagauucgcuuggagaagdtdt

SEQ ID NO: 222 - DNA, 23 bp, Artificial
  Targeted to influenza virus type A NS segment
cuucuccaagcgaaucucudtdt

SEQ ID NO: 223 - DNA, 23 bp, Artificial
  Targeted to influenza virus type A NS segment
caguaaugagaaugggagadtdt

SEQ ID NO: 224 - DNA, 23 bp, Artificial
  Targeted to influenza virus type A NS segment
ucucccauucucauuacugdtdt

SEQ ID NO: 225 - DNA, 23 bp, Artificial
  Targeted to influenza NS segment
uuguggauucuugaucgucdtdt

SEQ ID NO: 226 - DNA, 23 bp, Artificial
  Targeted to influenza virus type A NS segment
gacgaucaagaauccacaadtdt

SEQ ID NO: 227 - DNA, 59 bp, Artificial
  Oligenucleotide for plasmid construction
tcgagaaaaaagcaattgaggagtgcctgatctcttgaatcaggcactcctcaattgca

SEQ ID NO: 228 - DNA, 19 bp, Artificial
  Artificial sequence
gccactgaaatcagagcat

SEQ ID NO: 229 - DNA, 19 bp, Artificial
  Artificial sequence
tcagagcatccgtcggaaa

SEQ ID NO: 230 - DNA, 19 bp, Artificial
  Artificial sequence
ggacgattctacatccaaa

SEQ ID NO: 231 - DNA, 19 bp, Artificial
  Artificial sequence
cagcttaacaatagagaga

SEQ ID NO: 232 - DNA, 19 bp, Artificial
  Artificial sequence
gcttaacaatagagagaat

SEQ ID NO: 233 - DNA, 19 bp, Artificial
  Artificial sequence
aatagagagaatggtgctc

SEQ ID NO: 234 - DNA, 19 bp, Artificial
  Artificial sequence
gggaaagatcctaagaaaa

SEQ ID NO: 235 - DNA, 19 bp, Artificial
  Artificial sequence
ggaaagatcctaagaaaac

SEQ ID NO: 236 - DNA, 19 bp, Artificial
  Artificial sequence
tgagagaactcatccttta

SEQ ID NO: 237 - DNA, 19 bp, Artificial
  Artificial sequence
ttatgacaaagaagaaata

SEQ ID NO: 238 - DNA, 19 bp, Artificial
  Artificial sequence
acaagaattgcttatgaaa

SEQ ID NO: 239 - DNA, 19 bp, Artificial
  Artificial sequence
gaattgcttatgaaagaat

SEQ ID NO: 240 - DNA, 19 bp, Artificial
  Artificial sequence
aagcaatgatggatcaagt

SEQ ID NO: 241 - DNA, 19 bp, Artificial
  Artificial sequence
gcaatgatggatcaagtga

SEQ ID NO: 242 - DNA, 19 bp, Artificial
  Artificial sequence
tgatggatcaagtgagaga

SEQ ID NO: 243 - DNA, 19 bp, Artificial
  Artificial sequence
ccactagaggagttcaaat

SEQ ID NO: 244 - DNA, 19 bp, Artificial
  Artificial sequence
cactagaggagttcaaatt

SEQ ID NO: 245 - DNA, 19 bp, Artificial
  Artificial sequence
gaggaaacaccaatcaaca

SEQ ID NO: 246 - DNA, 19 bp, Artificial
  Artificial sequence
ggaaacaccaatcaacaga

SEQ ID NO: 247 - DNA, 19 bp, Artificial
  Artificial sequence
gggccaaatcagcatacaa

SEQ ID NO: 248 - DNA, 19 bp, Artificial
  Artificial sequence
caaccattatggcagcatt

SEQ ID NO: 249 - DNA, 19 bp, Artificial
  Sequences of functional target portions for RNAi to inhibit influenza virus.
ccattatggcagcattcaa

SEQ ID NO: 250 - DNA, 19 bp, Artificial
  Sequences of functional target portions for RNAi to inhibit influenza virus.
aggatgatggaaagtgcaa

SEQ ID NO: 251 - DNA, 19 bp, Artificial
  Sequences of functional target portions for RNAi to inhibit influenza virus.
gatgatggaaagtgcaaga

SEQ ID NO: 252 - DNA, 19 bp, Artificial
  Sequences of functional target portions for RNAi to inhibit influenza virus.
gagtaatgaaggatcttat

SEQ ID NO: 253 - DNA, 19 bp, Artificial
  Sequences of functional target portions for RNAi to inhibit influenza virus.
ggatcttatttcttcggag

SEQ ID NO: 254 - DNA, 19 bp, Artificial
  Sequences of functional target portions for RNAi to inhibit influenza virus.
gatcttatttcttcggaga

SEQ ID NO: 255 - DNA, 19 bp, Artificial
  Sequences of functional target portions for RNAi to inhibit influenza virus.
tcttatttcttcggagaca

SEQ ID NO: 256 - DNA, 19 bp, Artificial
  Sequences of functional target portions for RNAi to inhibit influenza virus.
ggagtacgacaattaaaga

SEQ ID NO: 257 - DNA, 19 bp, Artificial
  Sequences of functional target portions for RNAi to inhibit influenza virus.
gaactaagaaatctaatgt

SEQ ID NO: 258 - DNA, 19 bp, Artificial
  Sequences of functional target portions for RNAi to inhibit influenza virus.
tgaaatggatgatggcaat

SEQ ID NO: 259 - DNA, 19 bp, Artificial
  Sequences of functional target portions for RNAi to inhibit influenza virus.
ggaacatgctgggaacaga

SEQ ID NO: 260 - DNA, 19 bp, Artificial
  Sequences of functional target portions for RNAi to inhibit influenza virus.
gaatgatgatgttgatcaa

SEQ ID NO: 261 - DNA, 19 bp, Artificial
  Sequences of functional target portions for RNAi to inhibit influenza virus.
aatggaatttgaaccattt

SEQ ID NO: 262 - DNA, 19 bp, Artificial
  Sequences of functional target portions for RNAi to inhibit influenza virus.
atggaatttgaaccatttc

SEQ ID NO: 263 - DNA, 19 bp, Artificial
  Sequences of functional target portions for RNAi to inhibit influenza virus.
gcactaagcatcaatgaac

SEQ ID NO: 264 - DNA, 19 bp, Artificial
  Sequences of functional target portions for RNAi to inhibit influenza virus.
gcatcaatgaactgagcaa

SEQ ID NO: 265 - DNA, 19 bp, Artificial
  Sequences of functional target portions for RNAi to inhibit influenza virus.
cgggactctagcatactta

SEQ ID NO: 266 - DNA, 19 bp, Artificial
  Sequences of functional target portions for RNAi to inhibit influenza virus.
actgacagccagacagcga

SEQ ID NO: 267 - DNA, 19 bp, Artificial
  Sequences of functional target portions for RNAi to inhibit influenza virus.
agacagcgaccaaaagaat

SEQ ID NO: 268 - DNA, 19 bp, Artificial
  Sequences of functional target portions for RNAi to inhibit influenza virus.
gaattcggatggccatcaa

SEQ ID NO: 269 - DNA, 19 bp, Artificial
  Sequences of functional target portions for RNAi to inhibit influenza virus.
gcaggcaaaccatttgaat

SEQ ID NO: 270 - DNA, 19 bp, Artificial
  Sequences of functional target portions for RNAi to inhibit influenza virus.
aggcaaaccatttgaatgg

SEQ ID NO: 271 - DNA, 19 bp, Artificial
  Sequences of functional target portions for RNAi to inhibit influenza virus.
gcaaaccatttgaatggat

SEQ ID NO: 272 - DNA, 19 bp, Artificial
  Sequences of functional target portions for RNAi to inhibit influenza virus.
ccatttgaatggatgtcaa

SEQ ID NO: 273 - DNA, 19 bp, Artificial
  Sequences of functional target portions for RNAi to inhibit influenza virus.
gacaatgaaccaagtggtt

SEQ ID NO: 274 - DNA, 19 bp, Artificial
  Sequences of functional target portions for RNAi to inhibit influenza virus.
aagcaatggctttccttga

SEQ ID NO: 275 - DNA, 19 bp, Artificial
  Sequences of functional target portions for RNAi to inhibit influenza virus.
acctatgactggactctaa

SEQ ID NO: 276 - DNA, 19 bp, Artificial
  Sequences of functional target portions for RNAi to inhibit influenza virus.
actggactctaaatagaaa

SEQ ID NO: 277 - DNA, 19 bp, Artificial
  Sequences of functional target portions for RNAi to inhibit influenza virus.
ctccaataatgttctcaaa

SEQ ID NO: 278 - DNA, 19 bp, Artificial
  Sequences of functional target portions for RNAi to inhibit influenza virus.
ccaataatgttctcaaaca

SEQ ID NO: 279 - DNA, 19 bp, Artificial
  Sequences of functional target portions for RNAi to inhibit influenza virus.
gaaacttagaactcaaata

SEQ ID NO: 280 - DNA, 19 bp, Artificial
  Sequences of functional target portions for RNAi to inhibit influenza virus.
gcatcgatttgaaatattt

SEQ ID NO: 281 - DNA, 19 bp, Artificial
  Sequences of functional target portions for RNAi to inhibit influenza virus.
acatttgaattcacaagtt

SEQ ID NO: 282 - DNA, 19 bp, Artificial
  Sequences of functional target portions for RNAi to inhibit influenza virus.
catttgaattcacaagttt

SEQ ID NO: 283 - DNA, 19 bp, Artificial
  Sequences of functional target portions for RNAi to inhibit influenza virus.
ggacatgagtattggagtt

SEQ ID NO: 284 - DNA, 19 bp, Artificial
  Sequences of functional target portions for RNAi to inhibit influenza virus.
catgagtattggagttact

SEQ ID NO: 285 - DNA, 19 bp, Artificial
  Sequences of functional target portions for RNAi to inhibit influenza virus.
atgccatagaggtgacaca

SEQ ID NO: 286 - DNA, 19 bp, Artificial
  Sequences of functional target portions for RNAi to inhibit influenza virus.
catagaggtgacacacaaa

SEQ ID NO: 287 - DNA, 19 bp, Artificial
  Sequences of functional target portions for RNAi to inhibit influenza virus.
tagaggtgacacacaaata

SEQ ID NO: 288 - DNA, 19 bp, Artificial
  Sequences of functional target portions for RNAi to inhibit influenza virus.
ggtgacacacaaatacaaa

SEQ ID NO: 289 - DNA, 19 bp, Artificial
  Sequences of functional target portions for RNAi to inhibit influenza virus.
ccaaatttatacaacatta

SEQ ID NO: 290 - DNA, 19 bp, Artificial
  Sequences of functional target portions for RNAi to inhibit influenza virus.
ccactgaacccatttgtca

SEQ ID NO: 291 - DNA, 19 bp, Artificial
  Sequences of functional target portions for RNAi to inhibit influenza virus.
agccataaagaaattgaat

SEQ ID NO: 292 - DNA, 19 bp, Artificial
  Sequences of functional target portions for RNAi to inhibit influenza virus.
ccataaagaaattgaatca

SEQ ID NO: 293 - DNA, 19 bp, Artificial
  Sequences of functional target portions for RNAi to inhibit influenza virus.
ataaagaaattgaatcaat

SEQ ID NO: 294 - DNA, 19 bp, Artificial
  Sequences of functional target portions for RNAi to inhibit influenza virus.
agaaatcgatccatcttga

SEQ ID NO: 295 - DNA, 19 bp, Artificial
  Sequences of functional target portions for RNAi to inhibit influenza virus.
ttgaagatgaacaaatgta

SEQ ID NO: 296 - DNA, 19 bp, Artificial
  Sequences of functional target portions for RNAi to inhibit influenza virus.
aagatgaacaaatgtacca

SEQ ID NO: 297 - DNA, 19 bp, Artificial
  Sequences of functional target portions for RNAi to inhibit influenza virus.
gatgaacaaatgtaccaaa

SEQ ID NO: 298 - DNA, 19 bp, Artificial
  Sequences of functional target portions for RNAi to inhibit influenza virus.
cagcagttcatacagaaga

SEQ ID NO: 299 - DNA, 19 bp, Artificial
  Sequences of functional target portions for RNAi to inhibit influenza virus.
tttcgaatctggaaggata

SEQ ID NO: 300 - DNA, 19 bp, Artificial
  Sequences of functional target portions for RNAi to inhibit influenza virus.
atctggaaggataaagaaa

SEQ ID NO: 301 - DNA, 19 bp, Artificial
  Sequences of functional target portions for RNAi to inhibit influenza virus.
ctggaaggataaagaaaga

SEQ ID NO: 302 - DNA, 19 bp, Artificial
  Sequences of functional target portions for RNAi to inhibit influenza virus.
atgaagatctgttccacca

SEQ ID NO: 303 - DNA, 19 bp, Artificial
  Sequences of functional target portions for RNAi to inhibit influenza virus.
gatctgttccaccattgaa

SEQ ID NO: 304 - DNA, 19 bp, Artificial
  Sequences of functional target portions for RNAi to inhibit influenza virus.
acctgaaaatcgaaacaaa

SEQ ID NO: 305 - DNA, 19 bp, Artificial
  Sequences of functional target portions for RNAi to inhibit influenza virus.
gcacagatttgaaataatc

SEQ ID NO: 306 - DNA, 19 bp, Artificial
  Sequences of functional target portions for RNAi to inhibit influenza virus.
gaatagattcatcgaaatt

SEQ ID NO: 307 - DNA, 19 bp, Artificial
  Sequences of functional target portions for RNAi to inhibit influenza virus.
actacactctcgatgaaga

SEQ ID NO: 308 - DNA, 19 bp, Artificial
  Sequences of functional target portions for RNAi to inhibit influenza virus.
aaaccagactattcaccat

SEQ ID NO: 309 - DNA, 19 bp, Artificial
  Sequences of functional target portions for RNAi to inhibit influenza virus.
tcaccataagacaagaaat

SEQ ID NO: 310 - DNA, 19 bp, Artificial
  Sequences of functional target portions for RNAi to inhibit influenza virus.
ggaataaatccaaattatc

SEQ ID NO: 311 - DNA, 19 bp, Artificial
  Sequences of functional target portions for RNAi to inhibit influenza virus.
ctagcaagttggattcaga

SEQ ID NO: 312 - DNA, 19 bp, Artificial
  Sequences of functional target portions for RNAi to inhibit influenza virus.
ccaattgaacacattgcaa

SEQ ID NO: 313 - DNA, 19 bp, Artificial
  Sequences of functional target portions for RNAi to inhibit influenza virus.
gccacagaatacataatga

SEQ ID NO: 314 - DNA, 19 bp, Artificial
  Sequences of functional target portions for RNAi to inhibit influenza virus.
ccacagaatacataatgaa

SEQ ID NO: 315 - DNA, 19 bp, Artificial
  Sequences of functional target portions for RNAi to inhibit influenza virus.
ggatgatttccaattaatt

SEQ ID NO: 316 - DNA, 19 bp, Artificial
  Sequences of functional target portions for RNAi to inhibit influenza virus.
ggaagatcccacttaagga

SEQ ID NO: 317 - DNA, 19 bp, Artificial
  Sequences of functional target portions for RNAi to inhibit influenza virus.
acccaagacttgaaccaca

SEQ ID NO: 318 - DNA, 19 bp, Artificial
  Sequences of functional target portions for RNAi to inhibit influenza virus.
aagacttgaaccacataaa

SEQ ID NO: 319 - DNA, 19 bp, Artificial
  Sequences of functional target portions for RNAi to inhibit influenza virus.
ctccacaactagaaggatt

SEQ ID NO: 320 - DNA, 19 bp, Artificial
  Sequences of functional target portions for RNAi to inhibit influenza virus.
ggctatatgaagcaattga

SEQ ID NO: 321 - DNA, 19 bp, Artificial
  Sequences of functional target portions for RNAi to inhibit influenza virus.
gcaattgaggagtgcctga

SEQ ID NO: 322 - DNA, 19 bp, Artificial
  Sequences of functional target portions for RNAi to inhibit influenza virus.
attgaggagtgcctgatta

SEQ ID NO: 323 - DNA, 19 bp, Artificial
  Sequences of functional target portions for RNAi to inhibit influenza virus.
ttgaggagtgcctgattaa

SEQ ID NO: 324 - DNA, 19 bp, Artificial
  Sequences of functional target portions for RNAi to inhibit influenza virus.
aggagtgcctgattaatga

SEQ ID NO: 325 - DNA, 19 bp, Artificial
  Sequences of functional target portions for RNAi to inhibit influenza virus.
gattaatgatccctgggtt

SEQ ID NO: 326 - DNA, 19 bp, Artificial
  Sequences of functional target portions for RNAi to inhibit influenza virus.
attaatgatccctgggttt

SEQ ID NO: 327 - DNA, 19 bp, Artificial
  Sequences of functional target portions for RNAi to inhibit influenza virus.
tgatccctgggttttgctt

SEQ ID NO: 328 - DNA, 19 bp, Artificial
  Sequences of functional target portions for RNAi to inhibit influenza virus.
ccgaggtcgaaacgtacgt

SEQ ID NO: 329 - DNA, 19 bp, Artificial
  Sequences of functional target portions for RNAi to inhibit influenza virus.
accaatcctgtcacctctg

SEQ ID NO: 330 - DNA, 19 bp, Artificial
  Sequences of functional target portions for RNAi to inhibit influenza virus.
cagtgagcgaggactgcag

SEQ ID NO: 331 - DNA, 19 bp, Artificial
  Sequences of functional target portions for RNAi to inhibit influenza virus.
gacgctttgtccaaaatgc

SEQ ID NO: 332 - DNA, 19 bp, Artificial
  Sequences of functional target portions for RNAi to inhibit influenza virus.
tggctggatcgagtgagca

SEQ ID NO: 333 - DNA, 19 bp, Artificial
  Sequences of functional target portions for RNAi to inhibit influenza virus.
tgtggattcttgatcgtct

SEQ ID NO: 334 - DNA, 19 bp, Artificial
  Sequences of functional target portions for RNAi to inhibit influenza virus.
gtctatgagggaagaatat

SEQ ID NO: 335 - DNA, 19 bp, Artificial
  Sequences of functional target portions for RNAi to inhibit influenza virus.
gtcaggctaggcaaatggt

SEQ ID NO: 336 - DNA, 19 bp, Artificial
  Sequences of functional target portions for RNAi to inhibit influenza virus.
agcaaaagcagggtagata

SEQ ID NO: 337 - DNA, 19 bp, Artificial
  Sequences of functional target portions for RNAi to inhibit influenza virus.
gcaaaagcagggtagataa

SEQ ID NO: 338 - DNA, 19 bp, Artificial
  Sequences of functional target portions for RNAi to inhibit influenza virus.
caaaagcagggtagataat

SEQ ID NO: 339 - DNA, 19 bp, Artificial
  Sequences of functional target portions for RNAi to inhibit influenza virus.
aaagcagggtagataatca

SEQ ID NO: 340 - DNA, 19 bp, Artificial
  Sequences of functional target portions for RNAi to inhibit influenza virus.
cagggtagataatcactca

SEQ ID NO: 341 - DNA, 19 bp, Artificial
  Sequences of functional target portions for RNAi to inhibit influenza virus.
gtagataatcactcactga

SEQ ID NO: 342 - DNA, 19 bp, Artificial
  Sequences of functional target portions for RNAi to inhibit influenza virus.
ccaaacggtcttacgaaca

SEQ ID NO: 343 - DNA, 19 bp, Artificial
  Sequences of functional target portions for RNAi to inhibit influenza virus.
ggtcttacgaacagatgga

SEQ ID NO: 344 - DNA, 19 bp, Artificial
  Sequences of functional target portions for RNAi to inhibit influenza virus.
acgaacagatggagactga

SEQ ID NO: 345 - DNA, 19 bp, Artificial
  Sequences of functional target portions for RNAi to inhibit influenza virus.
gaacagatggagactgatg

SEQ ID NO: 346 - DNA, 19 bp, Artificial
  Sequences of functional target portions for RNAi to inhibit influenza virus.
agatggagactgatggaga

SEQ ID NO: 347 - DNA, 19 bp, Artificial
  Sequences of functional target portions for RNAi to inhibit influenza virus.
gatggagactgatggagaa

SEQ ID NO: 348 - DNA, 19 bp, Artificial
  Sequences of functional target portions for RNAi to inhibit influenza virus.
tgatggagaacgccagaat

SEQ ID NO: 349 - DNA, 19 bp, Artificial
  Sequences of functional target portions for RNAi to inhibit influenza virus.
ggagaacgccagaatgcca

SEQ ID NO: 350 - DNA, 19 bp, Artificial
  Sequences of functional target portions for RNAi to inhibit influenza virus.
cgccagaatgccactgaaa

SEQ ID NO: 351 - DNA, 19 bp, Artificial
  Sequences of functional target portions for RNAi to inhibit influenza virus.
ccagaatgccactgaaatc

SEQ ID NO: 352 - DNA, 19 bp, Artificial
  Sequences of functional target portions for RNAi to inhibit influenza virus.
gccactgaaatcagagcat

SEQ ID NO: 353 - DNA, 19 bp, Artificial
  Sequences of functional target portions for RNAi to inhibit influenza virus.
tcagagcatccgtcggaaa

SEQ ID NO: 354 - DNA, 19 bp, Artificial
  Sequences of functional target portions for RNAi to inhibit influenza virus.
cagagcatccgtcggaaaa

SEQ ID NO: 355 - DNA, 19 bp, Artificial
  Sequences of functional target portions for RNAi to inhibit influenza virus.
cggaaaaatgattggtgga

SEQ ID NO: 356 - DNA, 19 bp, Artificial
  Sequences of functional target portions for RNAi to inhibit influenza virus.
ggaaaaatgattggtggaa

SEQ ID NO: 357 - DNA, 19 bp, Artificial
  Sequences of functional target portions for RNAi to inhibit influenza virus.
gaaaaatgattggtggaat

SEQ ID NO: 358 - DNA, 19 bp, Artificial
  Sequences of functional target portions for RNAi to inhibit influenza virus.
aaaaatgattggtggaatt

SEQ ID NO: 359 - DNA, 19 bp, Artificial
  Sequences of functional target portions for RNAi to inhibit influenza virus.
gattggtggaattggacga

SEQ ID NO: 360 - DNA, 19 bp, Artificial
  Sequences of functional target portions for RNAi to inhibit influenza virus.
tggtggaattggacgattc

SEQ ID NO: 361 - DNA, 19 bp, Artificial
  Sequences of functional target portions for RNAi to inhibit influenza virus.
ggaattggacgattctaca

SEQ ID NO: 362 - DNA, 19 bp, Artificial
  Sequences of functional target portions for RNAi to inhibit influenza virus.
ggacgattctacatccaaa

SEQ ID NO: 363 - DNA, 19 bp, Artificial
  Sequences of functional target portions for RNAi to inhibit influenza virus.
gaactcaaactcagtgatt

SEQ ID NO: 364 - DNA, 19 bp, Artificial
  Sequences of functional target portions for RNAi to inhibit influenza virus.
actcaaactcagtgattat

SEQ ID NO: 365 - DNA, 19 bp, Artificial
  Sequences of functional target portions for RNAi to inhibit influenza virus.
actcagtgattatgaggga

SEQ ID NO: 366 - DNA, 19 bp, Artificial
  Sequences of functional target portions for RNAi to inhibit influenza virus.
gattatgagggacggttga

SEQ ID NO: 367 - DNA, 19 bp, Artificial
  Sequences of functional target portions for RNAi to inhibit influenza virus.
gagggacggttgatccaaa

SEQ ID NO: 368 - DNA, 19 bp, Artificial
  Sequences of functional target portions for RNAi to inhibit influenza virus.
ccaaaacagcttaacaata

SEQ ID NO: 369 - DNA, 19 bp, Artificial
  Sequences of functional target portions for RNAi to inhibit influenza virus.
caaaacagcttaacaatag

SEQ ID NO: 370 - DNA, 19 bp, Artificial
  Sequences of functional target portions for RNAi to inhibit influenza virus.
cagcttaacaatagagaga

SEQ ID NO: 371 - DNA, 19 bp, Artificial
  Sequences of functional target portions for RNAi to inhibit influenza virus.
gcttaacaatagagagaat

SEQ ID NO: 372 - DNA, 19 bp, Artificial
  Sequences of functional target portions for RNAi to inhibit influenza virus.
gaatggtgctctctgcttt

SEQ ID NO: 373 - DNA, 19 bp, Artificial
  Sequences of functional target portions for RNAi to inhibit influenza virus.
gcttttgacgaaaggagaa

SEQ ID NO: 374 - DNA, 19 bp, Artificial
  Sequences of functional target portions for RNAi to inhibit influenza virus.
tttgacgaaaggagaaata

SEQ ID NO: 375 - DNA, 19 bp, Artificial
  Sequences of functional target portions for RNAi to inhibit influenza virus.
tgacgaaaggagaaataaa

SEQ ID NO: 376 - DNA, 19 bp, Artificial
  Sequences of functional target portions for RNAi to inhibit influenza virus.
gacgaaaggagaaataaat

SEQ ID NO: 377 - DNA, 19 bp, Artificial
  Sequences of functional target portions for RNAi to inhibit influenza virus.
acgaaaggagaaataaata

SEQ ID NO: 378 - DNA, 19 bp, Artificial
  Sequences of functional target portions for RNAi to inhibit influenza virus.
cgaaaggagaaataaatac

SEQ ID NO: 379 - DNA, 19 bp, Artificial
  Sequences of functional target portions for RNAi to inhibit influenza virus.
ggagaaataaatacctgga

SEQ ID NO: 380 - DNA, 19 bp, Artificial
  Sequences of functional target portions for RNAi to inhibit influenza virus.
gagaaataaatacctggaa

SEQ ID NO: 381 - DNA, 19 bp, Artificial
  Sequences of functional target portions for RNAi to inhibit influenza virus.
agaaataaatacctggaag

SEQ ID NO: 382 - DNA, 19 bp, Artificial
  Sequences of functional target portions for RNAi to inhibit influenza virus.
gaaataaatacctggaaga

SEQ ID NO: 383 - DNA, 19 bp, Artificial
  Sequences of functional target portions for RNAi to inhibit influenza virus.
aaataaatacctggaagaa

SEQ ID NO: 384 - DNA, 19 bp, Artificial
  Sequences of functional target portions for RNAi to inhibit influenza virus.
ataaatacctggaagaaca

SEQ ID NO: 385 - DNA, 19 bp, Artificial
  Sequences of functional target portions for RNAi to inhibit influenza virus.
ggggaaagatcctaagaaa

SEQ ID NO: 386 - DNA, 19 bp, Artificial
  Sequences of functional target portions for RNAi to inhibit influenza virus.
gggaaagatcctaagaaaa

SEQ ID NO: 387 - DNA, 19 bp, Artificial
  Sequences of functional target portions for RNAi to inhibit influenza virus.
ggaaagatcctaagaaaac

SEQ ID NO: 388 - DNA, 19 bp, Artificial
  Sequences of functional target portions for RNAi to inhibit influenza virus.
taagaaaactggaggacct

SEQ ID NO: 389 - DNA, 19 bp, Artificial
  Sequences of functional target portions for RNAi to inhibit influenza virus.
gaaaactggaggacctata

SEQ ID NO: 390 - DNA, 19 bp, Artificial
  Sequences of functional target portions for RNAi to inhibit influenza virus.
ggacctatatacaggagag

SEQ ID NO: 391 - DNA, 19 bp, Artificial
  Sequences of functional target portions for RNAi to inhibit influenza virus.
cctatatacaggagagtaa

SEQ ID NO: 392 - DNA, 19 bp, Artificial
  Sequences of functional target portions for RNAi to inhibit influenza virus.
ctatatacaggagagtaaa

SEQ ID NO: 393 - DNA, 19 bp, Artificial
  Sequences of functional target portions for RNAi to inhibit influenza virus.
acaggagagtaaacggaaa

SEQ ID NO: 394 - DNA, 19 bp, Artificial
  Sequences of functional target portions for RNAi to inhibit influenza virus.
caggagagtaaacggaaag

SEQ ID NO: 395 - DNA, 19 bp, Artificial
  Sequences of functional target portions for RNAi to inhibit influenza virus.
gagtaaacggaaagtggat

SEQ ID NO: 396 - DNA, 19 bp, Artificial
  Sequences of functional target portions for RNAi to inhibit influenza virus.
gtaaacggaaagtggatga

SEQ ID NO: 397 - DNA, 19 bp, Artificial
  Sequences of functional target portions for RNAi to inhibit influenza virus.
acggaaagtggatgagaga

SEQ ID NO: 398 - DNA, 19 bp, Artificial
  Sequences of functional target portions for RNAi to inhibit influenza virus.
cggaaagtggatgagagaa

SEQ ID NO: 399 - DNA, 19 bp, Artificial
  Sequences of functional target portions for RNAi to inhibit influenza virus.
ggaaagtggatgagagaac

SEQ ID NO: 400 - DNA, 19 bp, Artificial
  Sequences of functional target portions for RNAi to inhibit influenza virus.
tgagagaactcatccttta

SEQ ID NO: 401 - DNA, 19 bp, Artificial
  Sequences of functional target portions for RNAi to inhibit influenza virus.
actcatcctttatgacaaa

SEQ ID NO: 402 - DNA, 19 bp, Artificial
  Guenter Gummersbach [info@marco-island.com]
cctttatgacaaagaagaa

SEQ ID NO: 403 - DNA, 19 bp, Artificial
  Guenter Gummersbach [info@marco-island.com]
ctttatgacaaagaagaaa

SEQ ID NO: 404 - DNA, 19 bp, Artificial
  Guenter Gummersbach [info@marco-island.com]
tttatgacaaagaagaaat

SEQ ID NO: 405 - DNA, 19 bp, Artificial
  Guenter Gummersbach [info@marco-island.com]
ttatgacaaagaagaaata

SEQ ID NO: 406 - DNA, 19 bp, Artificial
  Guenter Gummersbach [info@marco-island.com]
caaagaagaaataaggcga

SEQ ID NO: 407 - DNA, 19 bp, Artificial
  Guenter Gummersbach [info@marco-island.com]
aaagaagaaataaggcgaa

SEQ ID NO: 408 - DNA, 19 bp, Artificial
  Guenter Gummersbach [info@marco-island.com]
aagaagaaataaggcgaat

SEQ ID NO: 409 - DNA, 19 bp, Artificial
  Guenter Gummersbach [info@marco-island.com]
gaagaaataaggcgaatct

SEQ ID NO: 410 - DNA, 19 bp, Artificial
  Guenter Gummersbach [info@marco-island.com]
cgaatctggcgccaagcta

SEQ ID NO: 411 - DNA, 19 bp, Artificial
  Guenter Gummersbach [info@marco-island.com]
gaatctggcgccaagctaa

SEQ ID NO: 412 - DNA, 19 bp, Artificial
  Guenter Gummersbach [info@marco-island.com]
gcgccaagctaataatggt

SEQ ID NO: 413 - DNA, 19 bp, Artificial
  Guenter Gummersbach [info@marco-island.com]
agctaataatggtgacgat

SEQ ID NO: 414 - DNA, 19 bp, Artificial
  Guenter Gummersbach [info@marco-island.com]
taataatggtgacgatgca

SEQ ID NO: 415 - DNA, 19 bp, Artificial
  Guenter Gummersbach [info@marco-island.com]
ggtctgactcacatgatga

SEQ ID NO: 416 - DNA, 19 bp, Artificial
  Guenter Gummersbach [info@marco-island.com]
caatttgaatgatgcaact

SEQ ID NO: 417 - DNA, 19 bp, Artificial
  Guenter Gummersbach [info@marco-island.com]
atttgaatgatgcaactta

SEQ ID NO: 418 - DNA, 19 bp, Artificial
  Guenter Gummersbach [info@marco-island.com]
gcaacttatcagaggacaa

SEQ ID NO: 419 - DNA, 19 bp, Artificial
  Guenter Gummersbach [info@marco-island.com]
tatcagaggacaagagctc

SEQ ID NO: 420 - DNA, 19 bp, Artificial
  Guenter Gummersbach [info@marco-island.com]
tcagaggacaagagctctt

SEQ ID NO: 421 - DNA, 19 bp, Artificial
  Guenter Gummersbach [info@marco-island.com]
cggaatggatcccaggatg

SEQ ID NO: 422 - DNA, 19 bp, Artificial
  Guenter Gummersbach [info@marco-island.com]
ggaatggatcccaggatgt

SEQ ID NO: 423 - DNA, 19 bp, Artificial
  Guenter Gummersbach [info@marco-island.com]
ccgcaggtgctgcagtcaa

SEQ ID NO: 424 - DNA, 19 bp, Artificial
  Guenter Gummersbach [info@marco-island.com]
cgcaggtgctgcagtcaaa

SEQ ID NO: 425 - DNA, 19 bp, Artificial
  Guenter Gummersbach [info@marco-island.com]
cagtcaaaggagttggaac

SEQ ID NO: 426 - DNA, 19 bp, Artificial
  Sequences of functional target portions for RNAi to inhibit influenza virus.
agtcaaaggagttggaaca

SEQ ID NO: 427 - DNA, 19 bp, Artificial
  Sequences of functional target portions for RNAi to inhibit influenza virus.
gtcaaaggagttggaacaa

SEQ ID NO: 428 - DNA, 19 bp, Artificial
  Sequences of functional target portions for RNAi to inhibit influenza virus.
tcaaaggagttggaacaat

SEQ ID NO: 429 - DNA, 19 bp, Artificial
  Sequences of functional target portions for RNAi to inhibit influenza virus.
caaaggagttggaacaatg

SEQ ID NO: 430 - DNA, 19 bp, Artificial
  Sequences of functional target portions for RNAi to inhibit influenza virus.
ggagttggaacaatggtga

SEQ ID NO: 431 - DNA, 19 bp, Artificial
  Sequences of functional target portions for RNAi to inhibit influenza virus.
ggaacaatggtgatggaat

SEQ ID NO: 432 - DNA, 19 bp, Artificial
  Sequences of functional target portions for RNAi to inhibit influenza virus.
gaacaatggtgatggaatt

SEQ ID NO: 433 - DNA, 19 bp, Artificial
  Sequences of functional target portions for RNAi to inhibit influenza virus.
tgatggaattggtcaggat

SEQ ID NO: 434 - DNA, 19 bp, Artificial
  Sequences of functional target portions for RNAi to inhibit influenza virus.
atggaattggtcaggatga

SEQ ID NO: 435 - DNA, 19 bp, Artificial
  Sequences of functional target portions for RNAi to inhibit influenza virus.
tggaattggtcaggatgat

SEQ ID NO: 436 - DNA, 19 bp, Artificial
  Sequences of functional target portions for RNAi to inhibit influenza virus.
gaattggtcaggatgatca

SEQ ID NO: 437 - DNA, 19 bp, Artificial
  Sequences of functional target portions for RNAi to inhibit influenza virus.
gatgatcaaacgtgggatc

SEQ ID NO: 438 - DNA, 19 bp, Artificial
  Sequences of functional target portions for RNAi to inhibit influenza virus.
tgatcaaacgtgggatcaa

SEQ ID NO: 439 - DNA, 19 bp, Artificial
  Sequences of functional target portions for RNAi to inhibit influenza virus.
gatcaaacgtgggatcaat

SEQ ID NO: 440 - DNA, 19 bp, Artificial
  Sequences of functional target portions for RNAi to inhibit influenza virus.
ggatcaatgatcggaactt

SEQ ID NO: 441 - DNA, 19 bp, Artificial
  Sequences of functional target portions for RNAi to inhibit influenza virus.
gggtgagaatggacgaaaa

SEQ ID NO: 442 - DNA, 19 bp, Artificial
  Sequences of functional target portions for RNAi to inhibit influenza virus.
ggtgagaatggacgaaaaa

SEQ ID NO: 443 - DNA, 19 bp, Artificial
  Sequences of functional target portions for RNAi to inhibit influenza virus.
tgagaatggacgaaaaaca

SEQ ID NO: 444 - DNA, 19 bp, Artificial
  Sequences of functional target portions for RNAi to inhibit influenza virus.
gagaatggacgaaaaacaa

SEQ ID NO: 445 - DNA, 19 bp, Artificial
  Sequences of functional target portions for RNAi to inhibit influenza virus.
ggacgaaaaacaagaattg

SEQ ID NO: 446 - DNA, 19 bp, Artificial
  Sequences of functional target portions for RNAi to inhibit influenza virus.
cgaaaaacaagaattgctt

SEQ ID NO: 447 - DNA, 19 bp, Artificial
  Sequences of functional target portions for RNAi to inhibit influenza virus.
gaaaaacaagaattgctta

SEQ ID NO: 448 - DNA, 19 bp, Artificial
  Sequences of functional target portions for RNAi to inhibit influenza virus.
aaaaacaagaattgcttat

SEQ ID NO: 449 - DNA, 19 bp, Artificial
  Sequences of functional target portions for RNAi to inhibit influenza virus.
aaacaagaattgcttatga

SEQ ID NO: 450 - DNA, 19 bp, Artificial
  Sequences of functional target portions for RNAi to inhibit influenza virus.
aacaagaattgcttatgaa

SEQ ID NO: 451 - DNA, 19 bp, Artificial
  Sequences of functional target portions for RNAi to inhibit influenza virus.
acaagaattgcttatgaaa

SEQ ID NO: 452 - DNA, 19 bp, Artificial
  Sequences of functional target portions for RNAi to inhibit influenza virus.
aagaattgcttatgaaaga

SEQ ID NO: 453 - DNA, 19 bp, Artificial
  Sequences of functional target portions for RNAi to inhibit influenza virus.
gaattgcttatgaaagaat

SEQ ID NO: 454 - DNA, 19 bp, Artificial
  Sequences of functional target portions for RNAi to inhibit influenza virus.
cttatgaaagaatgtgcaa

SEQ ID NO: 455 - DNA, 19 bp, Artificial
  Sequences of functional target portions for RNAi to inhibit influenza virus.
tatgaaagaatgtgcaaca

SEQ ID NO: 456 - DNA, 19 bp, Artificial
  Sequences of functional target portions for RNAi to inhibit influenza virus.
tgaaagaatgtgcaacatt

SEQ ID NO: 457 - DNA, 19 bp, Artificial
  Sequences of functional target portions for RNAi to inhibit influenza virus.
gaaagaatgtgcaacattc

SEQ ID NO: 458 - DNA, 19 bp, Artificial
  Sequences of functional target portions for RNAi to inhibit influenza virus.
gcaacattctcaaagggaa

SEQ ID NO: 459 - DNA, 19 bp, Artificial
  Sequences of functional target portions for RNAi to inhibit influenza virus.
caacattctcaaagggaaa

SEQ ID NO: 460 - DNA, 19 bp, Artificial
  Sequences of functional target portions for RNAi to inhibit influenza virus.
tctcaaagggaaatttcaa

SEQ ID NO: 461 - DNA, 19 bp, Artificial
  Sequences of functional target portions for RNAi to inhibit influenza virus.
ctcaaagggaaatttcaaa

SEQ ID NO: 462 - DNA, 19 bp, Artificial
  Sequences of functional target portions for RNAi to inhibit influenza virus.
atttcaaactgctgcacaa

SEQ ID NO: 463 - DNA, 19 bp, Artificial
  Sequences of functional target portions for RNAi to inhibit influenza virus.
tcaaactgctgcacaaaaa

SEQ ID NO: 464 - DNA, 19 bp, Artificial
  Sequences of functional target portions for RNAi to inhibit influenza virus.
aaaaagcaatgatggatca

SEQ ID NO: 465 - DNA, 19 bp, Artificial
  Sequences of functional target portions for RNAi to inhibit influenza virus.
aagcaatgatggatcaagt

SEQ ID NO: 466 - DNA, 19 bp, Artificial
  Sequences of functional target portions for RNAi to inhibit influenza virus.
gcaatgatggatcaagtga

SEQ ID NO: 467 - DNA, 19 bp, Artificial
  Sequences of functional target portions for RNAi to inhibit influenza virus.
aatgatggatcaagtgaga

SEQ ID NO: 468 - DNA, 19 bp, Artificial
  Sequences of functional target portions for RNAi to inhibit influenza virus.
tgatggatcaagtgagaga

SEQ ID NO: 469 - DNA, 19 bp, Artificial
  Sequences of functional target portions for RNAi to inhibit influenza virus.
atggatcaagtgagagaga

SEQ ID NO: 470 - DNA, 19 bp, Artificial
  Sequences of functional target portions for RNAi to inhibit influenza virus.
ggatcaagtgagagagagc

SEQ ID NO: 471 - DNA, 19 bp, Artificial
  Sequences of functional target portions for RNAi to inhibit influenza virus.
gagccggaacccagggaat

SEQ ID NO: 472 - DNA, 19 bp, Artificial
  Sequences of functional target portions for RNAi to inhibit influenza virus.
cagggaatgctgagttcga

SEQ ID NO: 473 - DNA, 19 bp, Artificial
  Sequences of functional target portions for RNAi to inhibit influenza virus.
atgctgagttcgaagatct

SEQ ID NO: 474 - DNA, 19 bp, Artificial
  Sequences of functional target portions for RNAi to inhibit influenza virus.
gcactcatattgagagggt

SEQ ID NO: 475 - DNA, 19 bp, Artificial
  Sequences of functional target portions for RNAi to inhibit influenza virus.
ggtacgactttgaaagaga

SEQ ID NO: 476 - DNA, 19 bp, Artificial
  Sequences of functional target portions for RNAi to inhibit influenza virus.
cgactttgaaagagaggga

SEQ ID NO: 477 - DNA, 19 bp, Artificial
  Sequences of functional target portions for RNAi to inhibit influenza virus.
actttgaaagagagggata

SEQ ID NO: 478 - DNA, 19 bp, Artificial
  Sequences of functional target portions for RNAi to inhibit influenza virus.
tgaaagagagggatactct

SEQ ID NO: 479 - DNA, 19 bp, Artificial
  Sequences of functional target portions for RNAi to inhibit influenza virus.
gggatactctctagtcgga

SEQ ID NO: 480 - DNA, 19 bp, Artificial
  Sequences of functional target portions for RNAi to inhibit influenza virus.
gatactctctagtcggaat

SEQ ID NO: 481 - DNA, 19 bp, Artificial
  Sequences of functional target portions for RNAi to inhibit influenza virus.
cggaatagaccctttcaga

SEQ ID NO: 482 - DNA, 19 bp, Artificial
  Sequences of functional target portions for RNAi to inhibit influenza virus.
gaatagaccctttcagact

SEQ ID NO: 483 - DNA, 19 bp, Artificial
  Sequences of functional target portions for RNAi to inhibit influenza virus.
agccaagtgtacagcctaa

SEQ ID NO: 484 - DNA, 19 bp, Artificial
  Sequences of functional target portions for RNAi to inhibit influenza virus.
cagcctaatcagaccaaat

SEQ ID NO: 485 - DNA, 19 bp, Artificial
  Sequences of functional target portions for RNAi to inhibit influenza virus.
ctaatcagaccaaatgaga

SEQ ID NO: 486 - DNA, 19 bp, Artificial
  Sequences of functional target portions for RNAi to inhibit influenza virus.
taatcagaccaaatgagaa

SEQ ID NO: 487 - DNA, 19 bp, Artificial
  Sequences of functional target portions for RNAi to inhibit influenza virus.
aatcagaccaaatgagaat

SEQ ID NO: 488 - DNA, 19 bp, Artificial
  Sequences of functional target portions for RNAi to inhibit influenza virus.
atgagaatccagcacacaa

SEQ ID NO: 489 - DNA, 19 bp, Artificial
  Sequences of functional target portions for RNAi to inhibit influenza virus.
agagtcaactggtgtggat

SEQ ID NO: 490 - DNA, 19 bp, Artificial
  Sequences of functional target portions for RNAi to inhibit influenza virus.
caactggtgtggatggcat

SEQ ID NO: 491 - DNA, 19 bp, Artificial
  Sequences of functional target portions for RNAi to inhibit influenza virus.
catttgaagatctaagagt

SEQ ID NO: 492 - DNA, 19 bp, Artificial
  Sequences of functional target portions for RNAi to inhibit influenza virus.
atttgaagatctaagagta

SEQ ID NO: 493 - DNA, 19 bp, Artificial
  Sequences of functional target portions for RNAi to inhibit influenza virus.
tttgaagatctaagagtat

SEQ ID NO: 494 - DNA, 19 bp, Artificial
  Sequences of functional target portions for RNAi to inhibit influenza virus.
tgaagatctaagagtatta

SEQ ID NO: 495 - DNA, 19 bp, Artificial
  Sequences of functional target portions for RNAi to inhibit influenza virus.
atctaagagtattaagctt

SEQ ID NO: 496 - DNA, 19 bp, Artificial
  Sequences of functional target portions for RNAi to inhibit influenza virus.
ctaagagtattaagcttca

SEQ ID NO: 497 - DNA, 19 bp, Artificial
  Sequences of functional target portions for RNAi to inhibit influenza virus.
gagtattaagcttcatcaa

SEQ ID NO: 498 - DNA, 19 bp, Artificial
  Sequences of functional target portions for RNAi to inhibit influenza virus.
agtattaagcttcatcaaa

SEQ ID NO: 499 - DNA, 19 bp, Artificial
  Sequences of functional target portions for RNAi to inhibit influenza virus.
gtattaagcttcatcaaag

SEQ ID NO: 500 - DNA, 19 bp, Artificial
  Sequences of functional target portions for RNAi to inhibit influenza virus.
gggacgaaggtgctcccaa

SEQ ID NO: 501 - DNA, 19 bp, Artificial
  Sequences of functional target portions for RNAi to inhibit influenza virus.
ggacgaaggtgctcccaag

SEQ ID NO: 502 - DNA, 19 bp, Artificial
  Sequences of functional target portions for RNAi to inhibit influenza virus.
agagggaagctttccacta

SEQ ID NO: 503 - DNA, 19 bp, Artificial
  Sequences of functional target portions for RNAi to inhibit influenza virus.
gctttccactagaggagtt

SEQ ID NO: 504 - DNA, 19 bp, Artificial
  Sequences of functional target portions for RNAi to inhibit influenza virus.
ccactagaggagttcaaat

SEQ ID NO: 505 - DNA, 19 bp, Artificial
  Sequences of functional target portions for RNAi to inhibit influenza virus.
cactagaggagttcaaatt

SEQ ID NO: 506 - DNA, 19 bp, Artificial
  Sequences of functional target portions for RNAi to inhibit influenza virus.
agttcaaattgcttccaat

SEQ ID NO: 507 - DNA, 19 bp, Artificial
  Sequences of functional target portions for RNAi to inhibit influenza virus.
tcaaattgcttccaatgaa

SEQ ID NO: 508 - DNA, 19 bp, Artificial
  Sequences of functional target portions for RNAi to inhibit influenza virus.
caaattgcttccaatgaaa

SEQ ID NO: 509 - DNA, 19 bp, Artificial
  Sequences of functional target portions for RNAi to inhibit influenza virus.
atgaaaatatggagactat

SEQ ID NO: 510 - DNA, 19 bp, Artificial
  Sequences of functional target portions for RNAi to inhibit influenza virus.
aaatatggagactatggaa

SEQ ID NO: 511 - DNA, 19 bp, Artificial
  Sequences of functional target portions for RNAi to inhibit influenza virus.
aatatggagactatggaat

SEQ ID NO: 512 - DNA, 19 bp, Artificial
  Sequences of functional target portions for RNAi to inhibit influenza virus.
gagactatggaatcaagta

SEQ ID NO: 513 - DNA, 19 bp, Artificial
  Sequences of functional target portions for RNAi to inhibit influenza virus.
ggaatcaagtacacttgaa

SEQ ID NO: 514 - DNA, 19 bp, Artificial
  Sequences of functional target portions for RNAi to inhibit influenza virus.
aagtacacttgaactgaga

SEQ ID NO: 515 - DNA, 19 bp, Artificial
  Sequences of functional target portions for RNAi to inhibit influenza virus.
acacttgaactgagaagca

SEQ ID NO: 516 - DNA, 19 bp, Artificial
  Sequences of functional target portions for RNAi to inhibit influenza virus.
gaactgagaagcaggtact

SEQ ID NO: 517 - DNA, 19 bp, Artificial
  Sequences of functional target portions for RNAi to inhibit influenza virus.
agaagcaggtactgggcca

SEQ ID NO: 518 - DNA, 19 bp, Artificial
  Sequences of functional target portions for RNAi to inhibit influenza virus.
cataaggaccagaagtgga

SEQ ID NO: 519 - DNA, 19 bp, Artificial
  Sequences of functional target portions for RNAi to inhibit influenza virus.
ggaccagaagtggaggaaa

SEQ ID NO: 520 - DNA, 19 bp, Artificial
  Sequences of functional target portions for RNAi to inhibit influenza virus.
gaccagaagtggaggaaac

SEQ ID NO: 521 - DNA, 19 bp, Artificial
  Sequences of functional target portions for RNAi to inhibit influenza virus.
gaggaaacaccaatcaaca

SEQ ID NO: 522 - DNA, 19 bp, Artificial
  Sequences of functional target portions for RNAi to inhibit influenza virus.
ggaaacaccaatcaacaga

SEQ ID NO: 523 - DNA, 19 bp, Artificial
  Sequences of functional target portions for RNAi to inhibit influenza virus.
accaatcaacagagggcat

SEQ ID NO: 524 - DNA, 19 bp, Artificial
  Sequences of functional target portions for RNAi to inhibit influenza virus.
gggccaaatcagcatacaa

SEQ ID NO: 525 - DNA, 19 bp, Artificial
  Sequences of functional target portions for RNAi to inhibit influenza virus.
caacctacgttctcagtac

SEQ ID NO: 526 - DNA, 19 bp, Artificial
  Sequences of functional target portions for RNAi to inhibit influenza virus.
cgttctcagtacagagaaa

SEQ ID NO: 527 - DNA, 19 bp, Artificial
  Sequences of functional target portions for RNAi to inhibit influenza virus.
cagaacaaccattatggca

SEQ ID NO: 528 - DNA, 19 bp, Artificial
  Sequences of functional target portions for RNAi to inhibit influenza virus.
caaccattatggcagcatt

SEQ ID NO: 529 - DNA, 19 bp, Artificial
  Sequences of functional target portions for RNAi to inhibit influenza virus.
ccattatggcagcattcaa

SEQ ID NO: 530 - DNA, 19 bp, Artificial
  Sequences of functional target portions for RNAi to inhibit influenza virus.
cattatggcagcattcaat

SEQ ID NO: 531 - DNA, 19 bp, Artificial
  Sequences of functional target portions for RNAi to inhibit influenza virus.
tggcagcattcaatgggaa

SEQ ID NO: 532 - DNA, 19 bp, Artificial
  Sequences of functional target portions for RNAi to inhibit influenza virus.
ggcagcattcaatgggaat

SEQ ID NO: 533 - DNA, 19 bp, Artificial
  Sequences of functional target portions for RNAi to inhibit influenza virus.
gcagcattcaatgggaata

SEQ ID NO: 534 - DNA, 19 bp, Artificial
  Sequences of functional target portions for RNAi to inhibit influenza virus.
caatgggaatacagaggga

SEQ ID NO: 535 - DNA, 19 bp, Artificial
  Sequences of functional target portions for RNAi to inhibit influenza virus.
gggaatacagagggaagaa

SEQ ID NO: 536 - DNA, 19 bp, Artificial
  Sequences of functional target portions for RNAi to inhibit influenza virus.
gaatacagagggaagaaca

SEQ ID NO: 537 - DNA, 19 bp, Artificial
  Sequences of functional target portions for RNAi to inhibit influenza virus.
aatacagagggaagaacat

SEQ ID NO: 538 - DNA, 19 bp, Artificial
  Sequences of functional target portions for RNAi to inhibit influenza virus.
gagggaagaacatctgaca

SEQ ID NO: 539 - DNA, 19 bp, Artificial
  Sequences of functional target portions for RNAi to inhibit influenza virus.
gggaagaacatctgacatg

SEQ ID NO: 540 - DNA, 19 bp, Artificial
  Sequences of functional target portions for RNAi to inhibit influenza virus.
ggaagaacatctgacatga

SEQ ID NO: 541 - DNA, 19 bp, Artificial
  Sequences of functional target portions for RNAi to inhibit influenza virus.
tctgacatgaggaccgaaa

SEQ ID NO: 542 - DNA, 19 bp, Artificial
  Sequences of functional target portions for RNAi to inhibit influenza virus.
acatgaggaccgaaatcat

SEQ ID NO: 543 - DNA, 19 bp, Artificial
  Sequences of functional target portions for RNAi to inhibit influenza virus.
catgaggaccgaaatcata

SEQ ID NO: 544 - DNA, 19 bp, Artificial
  Sequences of functional target portions for RNAi to inhibit influenza virus.
atgaggaccgaaatcataa

SEQ ID NO: 545 - DNA, 19 bp, Artificial
  Sequences of functional target portions for RNAi to inhibit influenza virus.
ggaccgaaatcataaggat

SEQ ID NO: 546 - DNA, 19 bp, Artificial
  Sequences of functional target portions for RNAi to inhibit influenza virus.
accgaaatcataaggatga

SEQ ID NO: 547 - DNA, 19 bp, Artificial
  Sequences of functional target portions for RNAi to inhibit influenza virus.
ccgaaatcataaggatgat

SEQ ID NO: 548 - DNA, 19 bp, Artificial
  Sequences of functional target portions for RNAi to inhibit influenza virus.
atcataaggatgatggaaa

SEQ ID NO: 549 - DNA, 19 bp, Artificial
  Sequences of functional target portions for RNAi to inhibit influenza virus.
tcataaggatgatggaaag

SEQ ID NO: 550 - DNA, 19 bp, Artificial
  Sequences of functional target portions for RNAi to inhibit influenza virus.
aggatgatggaaagtgcaa

SEQ ID NO: 551 - DNA, 19 bp, Artificial
  Sequences of functional target portions for RNAi to inhibit influenza virus.
gatgatggaaagtgcaaga

SEQ ID NO: 552 - DNA, 19 bp, Artificial
  Sequences of functional target portions for RNAi to inhibit influenza virus.
gatggaaagtgcaagacca

SEQ ID NO: 553 - DNA, 19 bp, Artificial
  Sequences of functional target portions for RNAi to inhibit influenza virus.
ggaaagtgcaagaccagaa

SEQ ID NO: 554 - DNA, 19 bp, Artificial
  Sequences of functional target portions for RNAi to inhibit influenza virus.
gtgcaagaccagaagatgt

SEQ ID NO: 555 - DNA, 19 bp, Artificial
  Sequences of functional target portions for RNAi to inhibit influenza virus.
gaccagaagatgtgtcttt

SEQ ID NO: 556 - DNA, 19 bp, Artificial
  Sequences of functional target portions for RNAi to inhibit influenza virus.
tcttcgagctctcggacga

SEQ ID NO: 557 - DNA, 19 bp, Artificial
  Sequences of functional target portions for RNAi to inhibit influenza virus.
cttcctttgacatgagtaa

SEQ ID NO: 558 - DNA, 19 bp, Artificial
  Sequences of functional target portions for RNAi to inhibit influenza virus.
tgacatgagtaatgaagga

SEQ ID NO: 559 - DNA, 19 bp, Artificial
  Sequences of functional target portions for RNAi to inhibit influenza virus.
catgagtaatgaaggatct

SEQ ID NO: 560 - DNA, 19 bp, Artificial
  Sequences of functional target portions for RNAi to inhibit influenza virus.
gagtaatgaaggatcttat

SEQ ID NO: 561 - DNA, 19 bp, Artificial
  Sequences of functional target portions for RNAi to inhibit influenza virus.
gtaatgaaggatcttattt

SEQ ID NO: 562 - DNA, 19 bp, Artificial
  Sequences of functional target portions for RNAi to inhibit influenza virus.
ggatcttatttcttcggag

SEQ ID NO: 563 - DNA, 19 bp, Artificial
  Sequences of functional target portions for RNAi to inhibit influenza virus.
gatcttatttcttcggaga

SEQ ID NO: 564 - DNA, 19 bp, Artificial
  Sequences of functional target portions for RNAi to inhibit influenza virus.
gagacaatgcagaggagta

SEQ ID NO: 565 - DNA, 19 bp, Artificial
  Sequences of functional target portions for RNAi to inhibit influenza virus.
atgcagaggagtacgacaa

SEQ ID NO: 566 - DNA, 19 bp, Artificial
  Sequences of functional target portions for RNAi to inhibit influenza virus.
gcagaggagtacgacaatt

SEQ ID NO: 567 - DNA, 19 bp, Artificial
  Sequences of functional target portions for RNAi to inhibit influenza virus.
cagaggagtacgacaatta

SEQ ID NO: 568 - DNA, 19 bp, Artificial
  Sequences of functional target portions for RNAi to inhibit influenza virus.
gaggagtacgacaattaaa

SEQ ID NO: 569 - DNA, 19 bp, Artificial
  Sequences of functional target portions for RNAi to inhibit influenza virus.
ggagtacgacaattaaaga

SEQ ID NO: 570 - DNA, 19 bp, Artificial
  Sequences of functional target portions for RNAi to inhibit influenza virus.
gagtacgacaattaaagaa

SEQ ID NO: 571 - DNA, 19 bp, Artificial
  Sequences of functional target portions for RNAi to inhibit influenza virus.
agtacgacaattaaagaaa

SEQ ID NO: 572 - DNA, 19 bp, Artificial
  Sequences of functional target portions for RNAi to inhibit influenza virus.
gtacgacaattaaagaaaa

SEQ ID NO: 573 - DNA, 19 bp, Artificial
  Sequences of functional target portions for RNAi to inhibit influenza virus.
tacgacaattaaagaaaaa

SEQ ID NO: 574 - DNA, 19 bp, Artificial
  Sequences of functional target portions for RNAi to inhibit influenza virus.
cgacaattaaagaaaaata

SEQ ID NO: 575 - DNA, 19 bp, Artificial
  Sequences of functional target portions for RNAi to inhibit influenza virus.
gaaaaatacccttgtttct

SEQ ID NO: 576 - DNA, 19 bp, Artificial
  Sequences of functional target portions for RNAi to inhibit influenza virus.
agcgaaagcaggtcaatta

SEQ ID NO: 577 - DNA, 19 bp, Artificial
  Sequences of functional target portions for RNAi to inhibit influenza virus.
gcgaaagcaggtcaattat

SEQ ID NO: 578 - DNA, 19 bp, Artificial
  Sequences of functional target portions for RNAi to inhibit influenza virus.
cgaaagcaggtcaattata

SEQ ID NO: 579 - DNA, 19 bp, Artificial
  Sequences of functional target portions for RNAi to inhibit influenza virus.
gaaagcaggtcaattatat

SEQ ID NO: 580 - DNA, 19 bp, Artificial
  Sequences of functional target portions for RNAi to inhibit influenza virus.
aggtcaattatattcaata

SEQ ID NO: 581 - DNA, 19 bp, Artificial
  Sequences of functional target portions for RNAi to inhibit influenza virus.
ggtcaattatattcaatat

SEQ ID NO: 582 - DNA, 19 bp, Artificial
  Sequences of functional target portions for RNAi to inhibit influenza virus.
caattatattcaatatgga

SEQ ID NO: 583 - DNA, 19 bp, Artificial
  Sequences of functional target portions for RNAi to inhibit influenza virus.
aattatattcaatatggaa

SEQ ID NO: 584 - DNA, 19 bp, Artificial
  Sequences of functional target portions for RNAi to inhibit influenza virus.
attatattcaatatggaaa

SEQ ID NO: 585 - DNA, 19 bp, Artificial
  Sequences of functional target portions for RNAi to inhibit influenza virus.
tattcaatatggaaagaat

SEQ ID NO: 586 - DNA, 19 bp, Artificial
  Sequences of functional target portions for RNAi to inhibit influenza virus.
attcaatatggaaagaata

SEQ ID NO: 587 - DNA, 19 bp, Artificial
  Sequences of functional target portions for RNAi to inhibit influenza virus.
ttcaatatggaaagaataa

SEQ ID NO: 588 - DNA, 19 bp, Artificial
  Sequences of functional target portions for RNAi to inhibit influenza virus.
tcaatatggaaagaataaa

SEQ ID NO: 589 - DNA, 19 bp, Artificial
  Sequences of functional target portions for RNAi to inhibit influenza virus.
caatatggaaagaataaaa

SEQ ID NO: 590 - DNA, 19 bp, Artificial
  Sequences of functional target portions for RNAi to inhibit influenza virus.
tggaaagaataaaagaact

SEQ ID NO: 591 - DNA, 19 bp, Artificial
  Sequences of functional target portions for RNAi to inhibit influenza virus.
ggaaagaataaaagaacta

SEQ ID NO: 592 - DNA, 19 bp, Artificial
  Sequences of functional target portions for RNAi to inhibit influenza virus.
aagaataaaagaactaaga

SEQ ID NO: 593 - DNA, 19 bp, Artificial
  Sequences of functional target portions for RNAi to inhibit influenza virus.
gaataaaagaactaagaaa

SEQ ID NO: 594 - DNA, 19 bp, Artificial
  Sequences of functional target portions for RNAi to inhibit influenza virus.
aataaaagaactaagaaat

SEQ ID NO: 595 - DNA, 19 bp, Artificial
  Sequences of functional target portions for RNAi to inhibit influenza virus.
ataaaagaactaagaaatc

SEQ ID NO: 596 - DNA, 19 bp, Artificial
  Sequences of functional target portions for RNAi to inhibit influenza virus.
aaaagaactaagaaatcta

SEQ ID NO: 597 - DNA, 19 bp, Artificial
  Sequences of functional target portions for RNAi to inhibit influenza virus.
gaactaagaaatctaatgt

SEQ ID NO: 598 - DNA, 19 bp, Artificial
  Sequences of functional target portions for RNAi to inhibit influenza virus.
taagaaatctaatgtcgca

SEQ ID NO: 599 - DNA, 19 bp, Artificial
  Sequences of functional target portions for RNAi to inhibit influenza virus.
cccgcgagatactcacaaa

SEQ ID NO: 600 - DNA, 19 bp, Artificial
  Sequences of functional target portions for RNAi to inhibit influenza virus.
ccgtggaccatatggccat

SEQ ID NO: 601 - DNA, 19 bp, Artificial
  Sequences of functional target portions for RNAi to inhibit influenza virus.
gaccatatggccataatca

SEQ ID NO: 602 - DNA, 19 bp, Artificial
  Sequences of functional target portions for RNAi to inhibit influenza virus.
tggccataatcaagaagta

SEQ ID NO: 603 - DNA, 19 bp, Artificial
  Sequences of functional target portions for RNAi to inhibit influenza virus.
gccataatcaagaagtaca

SEQ ID NO: 604 - DNA, 19 bp, Artificial
  Sequences of functional target portions for RNAi to inhibit influenza virus.
aagaagtacacatcaggaa

SEQ ID NO: 605 - DNA, 19 bp, Artificial
  Sequences of functional target portions for RNAi to inhibit influenza virus.
gaagtacacatcaggaaga

SEQ ID NO: 606 - DNA, 19 bp, Artificial
  Sequences of functional target portions for RNAi to inhibit influenza virus.
catcaggaagacaggagaa

SEQ ID NO: 607 - DNA, 19 bp, Artificial
  Sequences of functional target portions for RNAi to inhibit influenza virus.
caggaagacaggagaagaa

SEQ ID NO: 608 - DNA, 19 bp, Artificial
  Sequences of functional target portions for RNAi to inhibit influenza virus.
ggagaagaacccagcactt

SEQ ID NO: 609 - DNA, 19 bp, Artificial
  Sequences of functional target portions for RNAi to inhibit influenza virus.
gagaagaacccagcactta

SEQ ID NO: 610 - DNA, 18 bp, Artificial
  Sequences of functional target portions for RNAi to inhibit influenza virus.
gcattaggatgaaatgga

SEQ ID NO: 611 - DNA, 19 bp, Artificial
  Sequences of functional target portions for RNAi to inhibit influenza virus.
cttaggatgaaatggatga

SEQ ID NO: 612 - DNA, 19 bp, Artificial
  Sequences of functional target portions for RNAi to inhibit influenza virus.
atgaaatggatgatggcaa

SEQ ID NO: 613 - DNA, 19 bp, Artificial
  Sequences of functional target portions for RNAi to inhibit influenza virus.
tgaaatggatgatggcaat

SEQ ID NO: 614 - DNA, 19 bp, Artificial
  Sequences of functional target portions for RNAi to inhibit influenza virus.
atggatgatggcaatgaaa

SEQ ID NO: 615 - DNA, 19 bp, Artificial
  Sequences of functional target portions for RNAi to inhibit influenza virus.
tggatgatggcaatgaaat

SEQ ID NO: 616 - DNA, 19 bp, Artificial
  Sequences of functional target portions for RNAi to inhibit influenza virus.
ggatgatggcaatgaaata

SEQ ID NO: 617 - DNA, 19 bp, Artificial
  Sequences of functional target portions for RNAi to inhibit influenza virus.
gatgatggcaatgaaatat

SEQ ID NO: 618 - DNA, 19 bp, Artificial
  Sequences of functional target portions for RNAi to inhibit influenza virus.
tggcaatgaaatatccaat

SEQ ID NO: 619 - DNA, 19 bp, Artificial
  Sequences of functional target portions for RNAi to inhibit influenza virus.
ggcaatgaaatatccaatt

SEQ ID NO: 620 - DNA, 19 bp, Artificial
  Sequences of functional target portions for RNAi to inhibit influenza virus.
gcaatgaaatatccaatta

SEQ ID NO: 621 - DNA, 19 bp, Artificial
  Sequences of functional target portions for RNAi to inhibit influenza virus.
aatgaaatatccaattaca

SEQ ID NO: 622 - DNA, 19 bp, Artificial
  Sequences of functional target portions for RNAi to inhibit influenza virus.
ttacagcagacaagaggat

SEQ ID NO: 623 - DNA, 19 bp, Artificial
  Sequences of functional target portions for RNAi to inhibit influenza virus.
acagcagacaagaggataa

SEQ ID NO: 624 - DNA, 19 bp, Artificial
  Sequences of functional target portions for RNAi to inhibit influenza virus.
agacaagaggataacggaa

SEQ ID NO: 625 - DNA, 19 bp, Artificial
  Sequences of functional target portions for RNAi to inhibit influenza virus.
gacaagaggataacggaaa

SEQ ID NO: 626 - DNA, 19 bp, Artificial
  Sequences of functional target portions for RNAi to inhibit influenza virus.
acaagaggataacggaaat

SEQ ID NO: 627 - DNA, 19 bp, Artificial
  Sequences of functional target portions for RNAi to inhibit influenza virus.
gaggataacggaaatgatt

SEQ ID NO: 628 - DNA, 19 bp, Artificial
  Sequences of functional target portions for RNAi to inhibit influenza virus.
ggaaatgattcctgagaga

SEQ ID NO: 629 - DNA, 19 bp, Artificial
  Sequences of functional target portions for RNAi to inhibit influenza virus.
gaaatgattcctgagagaa

SEQ ID NO: 630 - DNA, 19 bp, Artificial
  Sequences of functional target portions for RNAi to inhibit influenza virus.
aaatgattcctgagagaaa

SEQ ID NO: 631 - DNA, 19 bp, Artificial
  Sequences of functional target portions for RNAi to inhibit influenza virus.
tcctgagagaaatgagcaa

SEQ ID NO: 632 - DNA, 19 bp, Artificial
  Sequences of functional target portions for RNAi to inhibit influenza virus.
agagaaatgagcaaggaca

SEQ ID NO: 633 - DNA, 19 bp, Artificial
  Sequences of functional target portions for RNAi to inhibit influenza virus.
gagaaatgagcaaggacaa

SEQ ID NO: 634 - DNA, 19 bp, Artificial
  Sequences of functional target portions for RNAi to inhibit influenza virus.
agaaatgagcaaggacaaa

SEQ ID NO: 635 - DNA, 19 bp, Artificial
  Sequences of functional target portions for RNAi to inhibit influenza virus.
tgagcaaggacaaacttta

SEQ ID NO: 636 - DNA, 19 bp, Artificial
  Sequences of functional target portions for RNAi to inhibit influenza virus.
gagcaaggacaaactttat

SEQ ID NO: 637 - DNA, 19 bp, Artificial
  Sequences of functional target portions for RNAi to inhibit influenza virus.
aggacaaactttatggagt

SEQ ID NO: 638 - DNA, 19 bp, Artificial
  Sequences of functional target portions for RNAi to inhibit influenza virus.
ggacaaactttatggagta

SEQ ID NO: 639 - DNA, 19 bp, Artificial
  Sequences of functional target portions for RNAi to inhibit influenza virus.
gacaaactttatggagtaa

SEQ ID NO: 640 - DNA, 19 bp, Artificial
  Artificial sequence
caaactttatggagtaaaa

SEQ ID NO: 641 - DNA, 19 bp, Artificial
  Sequences of functional target portions for RNAi to inhibit influenza virus.
gagtaaaatgaatgatgca

SEQ ID NO: 642 - DNA, 19 bp, Artificial
  Sequences of functional target portions for RNAi to inhibit influenza virus.
aatgaatgatgcaggatca

SEQ ID NO: 643 - DNA, 19 bp, Artificial
  Sequences of functional target portions for RNAi to inhibit influenza virus.
gatcagaccgagtgatggt

SEQ ID NO: 644 - DNA, 19 bp, Artificial
  Sequences of functional target portions for RNAi to inhibit influenza virus.
gctgtgacatggtggaata

SEQ ID NO: 645 - DNA, 19 bp, Artificial
  Sequences of functional target portions for RNAi to inhibit influenza virus.
gtgacatggtggaatagga

SEQ ID NO: 646 - DNA, 19 bp, Artificial
  Sequences of functional target portions for RNAi to inhibit influenza virus.
tgacatggtggaataggaa

SEQ ID NO: 647 - DNA, 19 bp, Artificial
  Sequences of functional target portions for RNAi to inhibit influenza virus.
gtggaataggaatggacca

SEQ ID NO: 648 - DNA, 19 bp, Artificial
  Sequences of functional target portions for RNAi to inhibit influenza virus.
tggaataggaatggaccaa

SEQ ID NO: 649 - DNA, 19 bp, Artificial
  Sequences of functional target portions for RNAi to inhibit influenza virus.
gaataggaatggaccaata

SEQ ID NO: 650 - DNA, 19 bp, Artificial
  Sequences of functional target portions for RNAi to inhibit influenza virus.
aataggaatggaccaataa

SEQ ID NO: 651 - DNA, 19 bp, Artificial
  Sequences of functional target portions for RNAi to inhibit influenza virus.
aggaatggaccaataacaa

SEQ ID NO: 652 - DNA, 19 bp, Artificial
  Sequences of functional target portions for RNAi to inhibit influenza virus.
ggaatggaccaataacaaa

SEQ ID NO: 653 - DNA, 19 bp, Artificial
  Sequences of functional target portions for RNAi to inhibit influenza virus.
gaatggaccaataacaaat

SEQ ID NO: 654 - DNA, 19 bp, Artificial
  Sequences of functional target portions for RNAi to inhibit influenza virus.
ccaataacaaatacagttc

SEQ ID NO: 655 - DNA, 19 bp, Artificial
  Sequences of functional target portions for RNAi to inhibit influenza virus.
aataacaaatacagttcat

SEQ ID NO: 656 - DNA, 19 bp, Artificial
  Sequences of functional target portions for RNAi to inhibit influenza virus.
taacaaatacagttcatta

SEQ ID NO: 657 - DNA, 19 bp, Artificial
  Sequences of functional target portions for RNAi to inhibit influenza virus.
aacaaatacagttcattat

SEQ ID NO: 658 - DNA, 19 bp, Artificial
  Sequences of functional target portions for RNAi to inhibit influenza virus.
atacagttcattatccaaa

SEQ ID NO: 659 - DNA, 19 bp, Artificial
  Sequences of functional target portions for RNAi to inhibit influenza virus.
ccaaaaatctacaaaactt

SEQ ID NO: 660 - DNA, 19 bp, Artificial
  Sequences of functional target portions for RNAi to inhibit influenza virus.
caaaaatctacaaaactta

SEQ ID NO: 661 - DNA, 19 bp, Artificial
  Sequences of functional target portions for RNAi to inhibit influenza virus.
aaacttattttgaaagagt

SEQ ID NO: 662 - DNA, 19 bp, Artificial
  Sequences of functional target portions for RNAi to inhibit influenza virus.
ttgaaagagtcgaaaggct

SEQ ID NO: 663 - DNA, 19 bp, Artificial
  Sequences of functional target portions for RNAi to inhibit influenza virus.
tgaaagagtcgaaaggcta

SEQ ID NO: 664 - DNA, 19 bp, Artificial
  Sequences of functional target portions for RNAi to inhibit influenza virus.
gaaagagtcgaaaggctaa

SEQ ID NO: 665 - DNA, 19 bp, Artificial
  Sequences of functional target portions for RNAi to inhibit influenza virus.
agtcgaaaggctaaagcat

SEQ ID NO: 666 - DNA, 19 bp, Artificial
  Sequences of functional target portions for RNAi to inhibit influenza virus.
gctaaagcatggaaccttt

SEQ ID NO: 667 - DNA, 19 bp, Artificial
  Sequences of functional target portions for RNAi to inhibit influenza virus.
gcatggaacctttggccct

SEQ ID NO: 668 - DNA, 19 bp, Artificial
  Sequences of functional target portions for RNAi to inhibit influenza virus.
ttttagaaaccaagtcaaa

SEQ ID NO: 669 - DNA, 19 bp, Artificial
  Sequences of functional target portions for RNAi to inhibit influenza virus.
ttagaaaccaagtcaaaat

SEQ ID NO: 670 - DNA, 19 bp, Artificial
  Sequences of functional target portions for RNAi to inhibit influenza virus.
agtcaaaatacgtcggaga

SEQ ID NO: 671 - DNA, 19 bp, Artificial
  Sequences of functional target portions for RNAi to inhibit influenza virus.
caaaatacgtcggagagtt

SEQ ID NO: 672 - DNA, 19 bp, Artificial
  Sequences of functional target portions for RNAi to inhibit influenza virus.
acgtcggagagttgacata

SEQ ID NO: 673 - DNA, 19 bp, Artificial
  Sequences of functional target portions for RNAi to inhibit influenza virus.
gtcggagagttgacataaa

SEQ ID NO: 674 - DNA, 19 bp, Artificial
  Sequences of functional target portions for RNAi to inhibit influenza virus.
tcggagagttgacataaat

SEQ ID NO: 675 - DNA, 19 bp, Artificial
  Sequences of functional target portions for RNAi to inhibit influenza virus.
tgacataaatcctggtcat

SEQ ID NO: 676 - DNA, 19 bp, Artificial
  Sequences of functional target portions for RNAi to inhibit influenza virus.
cataaatcctggtcatgca

SEQ ID NO: 677 - DNA, 19 bp, Artificial
  Sequences of functional target portions for RNAi to inhibit influenza virus.
ccaaggaggcacaggatgt

SEQ ID NO: 678 - DNA, 19 bp, Artificial
  Sequences of functional target portions for RNAi to inhibit influenza virus.
aggcacaggatgtaatcat

SEQ ID NO: 679 - DNA, 19 bp, Artificial
  Sequences of functional target portions for RNAi to inhibit influenza virus.
aggatgtaatcatggaagt

SEQ ID NO: 680 - DNA, 19 bp, Artificial
  Sequences of functional target portions for RNAi to inhibit influenza virus.
ggatgtaatcatggaagtt

SEQ ID NO: 681 - DNA, 19 bp, Artificial
  Sequences of functional target portions for RNAi to inhibit influenza virus.
cgaagtgggagccaggata

SEQ ID NO: 682 - DNA, 19 bp, Artificial
  Sequences of functional target portions for RNAi to inhibit influenza virus.
gtgggagccaggatactaa

SEQ ID NO: 683 - DNA, 19 bp, Artificial
  Sequences of functional target portions for RNAi to inhibit influenza virus.
caggatactaacatcggaa

SEQ ID NO: 684 - DNA, 19 bp, Artificial
  Sequences of functional target portions for RNAi to inhibit influenza virus.
ggatactaacatcggaatc

SEQ ID NO: 685 - DNA, 19 bp, Artificial
  Sequences of functional target portions for RNAi to inhibit influenza virus.
acatcggaatcgcaactaa

SEQ ID NO: 686 - DNA, 19 bp, Artificial
  Sequences of functional target portions for RNAi to inhibit influenza virus.
ggaatcgcaactaacgata

SEQ ID NO: 687 - DNA, 19 bp, Artificial
  Sequences of functional target portions for RNAi to inhibit influenza virus.
gaatcgcaactaacgataa

SEQ ID NO: 688 - DNA, 19 bp, Artificial
  Sequences of functional target portions for RNAi to inhibit influenza virus.
gcaactaacgataaccaaa

SEQ ID NO: 689 - DNA, 19 bp, Artificial
  Sequences of functional target portions for RNAi to inhibit influenza virus.
ctaacgataaccaaagaga

SEQ ID NO: 690 - DNA, 19 bp, Artificial
  Sequences of functional target portions for RNAi to inhibit influenza virus.
taacgataaccaaagagaa

SEQ ID NO: 691 - DNA, 19 bp, Artificial
  Sequences of functional target portions for RNAi to inhibit influenza virus.
aacgataaccaaagagaag

SEQ ID NO: 692 - DNA, 19 bp, Artificial
  Sequences of functional target portions for RNAi to inhibit influenza virus.
cgataaccaaagagaagaa

SEQ ID NO: 693 - DNA, 19 bp, Artificial
  Sequences of functional target portions for RNAi to inhibit influenza virus.
taaccaaagagaagaaaga

SEQ ID NO: 694 - DNA, 19 bp, Artificial
  Sequences of functional target portions for RNAi to inhibit influenza virus.
accaaagagaagaaagaag

SEQ ID NO: 695 - DNA, 19 bp, Artificial
  Sequences of functional target portions for RNAi to inhibit influenza virus.
ccaaagagaagaaagaaga

SEQ ID NO: 696 - DNA, 19 bp, Artificial
  Sequences of functional target portions for RNAi to inhibit influenza virus.
caaagagaagaaagaagaa

SEQ ID NO: 697 - DNA, 19 bp, Artificial
  Sequences of functional target portions for RNAi to inhibit influenza virus.
aagagaagaaagaagaact

SEQ ID NO: 698 - DNA, 19 bp, Artificial
  Sequences of functional target portions for RNAi to inhibit influenza virus.
agagaagaaagaagaactc

SEQ ID NO: 699 - DNA, 19 bp, Artificial
  Sequences of functional target portions for RNAi to inhibit influenza virus.
agaagaaagaagaactcca

SEQ ID NO: 700 - DNA, 19 bp, Artificial
  Sequences of functional target portions for RNAi to inhibit influenza virus.
agaaagaagaactccagga

SEQ ID NO: 701 - DNA, 19 bp, Artificial
  Sequences of functional target portions for RNAi to inhibit influenza virus.
gaaagaagaactccaggat

SEQ ID NO: 702 - DNA, 19 bp, Artificial
  Sequences of functional target portions for RNAi to inhibit influenza virus.
aaagaagaactccaggatt

SEQ ID NO: 703 - DNA, 19 bp, Artificial
  Sequences of functional target portions for RNAi to inhibit influenza virus.
aagaagaactccaggattg

SEQ ID NO: 704 - DNA, 19 bp, Artificial
  Sequences of functional target portions for RNAi to inhibit influenza virus.
ctcctttgatggttgcata

SEQ ID NO: 705 - DNA, 19 bp, Artificial
  Sequences of functional target portions for RNAi to inhibit influenza virus.
gttgcatacatgttggaga

SEQ ID NO: 706 - DNA, 19 bp, Artificial
  Sequences of functional target portions for RNAi to inhibit influenza virus.
catacatgttggagagaga

SEQ ID NO: 707 - DNA, 19 bp, Artificial
  Sequences of functional target portions for RNAi to inhibit influenza virus.
agagagaactggtccgcaa

SEQ ID NO: 708 - DNA, 19 bp, Artificial
  Sequences of functional target portions for RNAi to inhibit influenza virus.
gagagaactggtccgcaaa

SEQ ID NO: 709 - DNA, 19 bp, Artificial
  Sequences of functional target portions for RNAi to inhibit influenza virus.
cccagtggctggtggaaca

SEQ ID NO: 710 - DNA, 19 bp, Artificial
  Sequences of functional target portions for RNAi to inhibit influenza virus.
tggaacaagcagtgtgtac

SEQ ID NO: 711 - DNA, 19 bp, Artificial
  Sequences of functional target portions for RNAi to inhibit influenza virus.
ggaacaagcagtgtgtaca

SEQ ID NO: 712 - DNA, 19 bp, Artificial
  Sequences of functional target portions for RNAi to inhibit influenza virus.
gaacaagcagtgtgtacat

SEQ ID NO: 713 - DNA, 19 bp, Artificial
  Sequences of functional target portions for RNAi to inhibit influenza virus.
caagcagtgtgtacattga

SEQ ID NO: 714 - DNA, 19 bp, Artificial
  Sequences of functional target portions for RNAi to inhibit influenza virus.
gtgtgtacattgaagtgtt

SEQ ID NO: 715 - DNA, 19 bp, Artificial
  Sequences of functional target portions for RNAi to inhibit influenza virus.
acattgaagtgttgcattt

SEQ ID NO: 716 - DNA, 19 bp, Artificial
  Sequences of functional target portions for RNAi to inhibit influenza virus.
gcatttgactcaaggaaca

SEQ ID NO: 717 - DNA, 19 bp, Artificial
  Sequences of functional target portions for RNAi to inhibit influenza virus.
tcaaggaacatgctgggaa

SEQ ID NO: 718 - DNA, 19 bp, Artificial
  Sequences of functional target portions for RNAi to inhibit influenza virus.
caaggaacatgctgggaac

SEQ ID NO: 719 - DNA, 19 bp, Artificial
  Sequences of functional target portions for RNAi to inhibit influenza virus.
ggaacatgctgggaacaga

SEQ ID NO: 720 - DNA, 19 bp, Artificial
  Sequences of functional target portions for RNAi to inhibit influenza virus.
gaacatgctgggaacagat

SEQ ID NO: 721 - DNA, 19 bp, Artificial
  Sequences of functional target portions for RNAi to inhibit influenza virus.
catgctgggaacagatgta

SEQ ID NO: 722 - DNA, 19 bp, Artificial
  Sequences of functional target portions for RNAi to inhibit influenza virus.
gtatactccaggaggggaa

SEQ ID NO: 723 - DNA, 19 bp, Artificial
  Sequences of functional target portions for RNAi to inhibit influenza virus.
caggaggggaagtgaggaa

SEQ ID NO: 724 - DNA, 19 bp, Artificial
  Sequences of functional target portions for RNAi to inhibit influenza virus.
gggaagtgaggaatgatga

SEQ ID NO: 725 - DNA, 19 bp, Artificial
  Sequences of functional target portions for RNAi to inhibit influenza virus.
ggaagtgaggaatgatgat

SEQ ID NO: 726 - DNA, 19 bp, Artificial
  Sequences of functional target portions for RNAi to inhibit influenza virus.
agtgaggaatgatgatgtt

SEQ ID NO: 727 - DNA, 19 bp, Artificial
  Sequences of functional target portions for RNAi to inhibit influenza virus.
tgaggaatgatgatgttga

SEQ ID NO: 728 - DNA, 19 bp, Artificial
  Sequences of functional target portions for RNAi to inhibit influenza virus.
gaggaatgatgatgttgat

SEQ ID NO: 729 - DNA, 19 bp, Artificial
  Sequences of functional target portions for RNAi to inhibit influenza virus.
ggaatgatgatgttgatca

SEQ ID NO: 730 - DNA, 19 bp, Artificial
  Sequences of functional target portions for RNAi to inhibit influenza virus.
gaatgatgatgttgatcaa

SEQ ID NO: 731 - DNA, 19 bp, Artificial
  Sequences of functional target portions for RNAi to inhibit influenza virus.
gttgatcaaagcttgatta

SEQ ID NO: 732 - DNA, 19 bp, Artificial
  Sequences of functional target portions for RNAi to inhibit influenza virus.
gatcaaagcttgattattg

SEQ ID NO: 733 - DNA, 19 bp, Artificial
  Sequences of functional target portions for RNAi to inhibit influenza virus.
tgattattgctgctaggaa

SEQ ID NO: 734 - DNA, 19 bp, Artificial
  Sequences of functional target portions for RNAi to inhibit influenza virus.
gattattgctgctaggaac

SEQ ID NO: 735 - DNA, 19 bp, Artificial
  Sequences of functional target portions for RNAi to inhibit influenza virus.
gctgctaggaacatagtga

SEQ ID NO: 736 - DNA, 19 bp, Artificial
  Sequences of functional target portions for RNAi to inhibit influenza virus.
tgctaggaacatagtgaga

SEQ ID NO: 737 - DNA, 19 bp, Artificial
  Sequences of functional target portions for RNAi to inhibit influenza virus.
gctaggaacatagtgagaa

SEQ ID NO: 738 - DNA, 19 bp, Artificial
  Sequences of functional target portions for RNAi to inhibit influenza virus.
ctaggaacatagtgagaag

SEQ ID NO: 739 - DNA, 19 bp, Artificial
  Sequences of functional target portions for RNAi to inhibit influenza virus.
gaacatagtgagaagagct

SEQ ID NO: 740 - DNA, 19 bp, Artificial
  Sequences of functional target portions for RNAi to inhibit influenza virus.
agtgagaagagctgcagta

SEQ ID NO: 741 - DNA, 19 bp, Artificial
  Sequences of functional target portions for RNAi to inhibit influenza virus.
gagaagagctgcagtatca

SEQ ID NO: 742 - DNA, 19 bp, Artificial
  Sequences of functional target portions for RNAi to inhibit influenza virus.
tagcatctttattggagat

SEQ ID NO: 743 - DNA, 19 bp, Artificial
  Sequences of functional target portions for RNAi to inhibit influenza virus.
ctttattggagatgtgcca

SEQ ID NO: 744 - DNA, 19 bp, Artificial
  Sequences of functional target portions for RNAi to inhibit influenza virus.
gtgccacagcacacagatt

SEQ ID NO: 745 - DNA, 19 bp, Artificial
  Sequences of functional target portions for RNAi to inhibit influenza virus.
gcacacagattggtggaat

SEQ ID NO: 746 - DNA, 19 bp, Artificial
  Sequences of functional target portions for RNAi to inhibit influenza virus.
cacacagattggtggaatt

SEQ ID NO: 747 - DNA, 19 bp, Artificial
  Sequences of functional target portions for RNAi to inhibit influenza virus.
acacagattggtggaatta

SEQ ID NO: 748 - DNA, 19 bp, Artificial
  Sequences of functional target portions for RNAi to inhibit influenza virus.
gtggaattaggatggtaga

SEQ ID NO: 749 - DNA, 19 bp, Artificial
  Sequences of functional target portions for RNAi to inhibit influenza virus.
ggaattaggatggtagaca

SEQ ID NO: 750 - DNA, 19 bp, Artificial
  Sequences of functional target portions for RNAi to inhibit influenza virus.
gaattaggatggtagacat

SEQ ID NO: 751 - DNA, 19 bp, Artificial
  Sequences of functional target portions for RNAi to inhibit influenza virus.
tggtagacatccttaggca

SEQ ID NO: 752 - DNA, 19 bp, Artificial
  Sequences of functional target portions for RNAi to inhibit influenza virus.
gtagacatccttaggcaga

SEQ ID NO: 753 - DNA, 19 bp, Artificial
  Sequences of functional target portions for RNAi to inhibit influenza virus.
aggcagaacccaacagaag

SEQ ID NO: 754 - DNA, 19 bp, Artificial
  Sequences of functional target portions for RNAi to inhibit influenza virus.
ggcagaacccaacagaaga

SEQ ID NO: 755 - DNA, 19 bp, Artificial
  Sequences of functional target portions for RNAi to inhibit influenza virus.
gaacccaacagaagagcaa

SEQ ID NO: 756 - DNA, 19 bp, Artificial
  Sequences of functional target portions for RNAi to inhibit influenza virus.
caacagaagagcaagccgt

SEQ ID NO: 757 - DNA, 19 bp, Artificial
  Sequences of functional target portions for RNAi to inhibit influenza virus.
cagaagagcaagccgtgga

SEQ ID NO: 758 - DNA, 19 bp, Artificial
  Sequences of functional target portions for RNAi to inhibit influenza virus.
aagagcaagccgtggatat

SEQ ID NO: 759 - DNA, 19 bp, Artificial
  Sequences of functional target portions for RNAi to inhibit influenza virus.
agagcaagccgtggatata

SEQ ID NO: 760 - DNA, 19 bp, Artificial
  Sequences of functional target portions for RNAi to inhibit influenza virus.
atgcaaggctgcaatggga

SEQ ID NO: 761 - DNA, 19 bp, Artificial
  Sequences of functional target portions for RNAi to inhibit influenza virus.
ctgcaatgggactgagaat

SEQ ID NO: 762 - DNA, 19 bp, Artificial
  Sequences of functional target portions for RNAi to inhibit influenza virus.
gcaatgggactgagaatta

SEQ ID NO: 763 - DNA, 19 bp, Artificial
  Sequences of functional target portions for RNAi to inhibit influenza virus.
gggactgagaattagctca

SEQ ID NO: 764 - DNA, 19 bp, Artificial
  Sequences of functional target portions for RNAi to inhibit influenza virus.
ggactgagaattagctcat

SEQ ID NO: 765 - DNA, 19 bp, Artificial
  Sequences of functional target portions for RNAi to inhibit influenza virus.
agaattagctcatccttca

SEQ ID NO: 766 - DNA, 19 bp, Artificial
  Sequences of functional target portions for RNAi to inhibit influenza virus.
ggattcacatttaagagaa

SEQ ID NO: 767 - DNA, 19 bp, Artificial
  Sequences of functional target portions for RNAi to inhibit influenza virus.
gattcacatttaagagaac

SEQ ID NO: 768 - DNA, 19 bp, Artificial
  Sequences of functional target portions for RNAi to inhibit influenza virus.
tttaagagaacaagcggat

SEQ ID NO: 769 - DNA, 19 bp, Artificial
  Sequences of functional target portions for RNAi to inhibit influenza virus.
taagagaacaagcggatca

SEQ ID NO: 770 - DNA, 19 bp, Artificial
  Sequences of functional target portions for RNAi to inhibit influenza virus.
gagaacaagcggatcatca

SEQ ID NO: 771 - DNA, 19 bp, Artificial
  Sequences of functional target portions for RNAi to inhibit influenza virus.
gatcatcagtcaagagaga

SEQ ID NO: 772 - DNA, 19 bp, Artificial
  Sequences of functional target portions for RNAi to inhibit influenza virus.
cagtcaagagagaggaaga

SEQ ID NO: 773 - DNA, 19 bp, Artificial
  Sequences of functional target portions for RNAi to inhibit influenza virus.
caagagagaggaagaggtg

SEQ ID NO: 774 - DNA, 19 bp, Artificial
  Sequences of functional target portions for RNAi to inhibit influenza virus.
agagagaggaagaggtgct

SEQ ID NO: 775 - DNA, 19 bp, Artificial
  Sequences of functional target portions for RNAi to inhibit influenza virus.
gagaggaagaggtgcttac

SEQ ID NO: 776 - DNA, 19 bp, Artificial
  Sequences of functional target portions for RNAi to inhibit influenza virus.
gaagaggtgcttacgggca

SEQ ID NO: 777 - DNA, 19 bp, Artificial
  Sequences of functional target portions for RNAi to inhibit influenza virus.
aagaggtgcttacgggcaa

SEQ ID NO: 778 - DNA, 19 bp, Artificial
  Sequences of functional target portions for RNAi to inhibit influenza virus.
cgggcaatcttcaaacatt

SEQ ID NO: 779 - DNA, 19 bp, Artificial
  Sequences of functional target portions for RNAi to inhibit influenza virus.
gggcaatcttcaaacattg

SEQ ID NO: 780 - DNA, 19 bp, Artificial
  Sequences of functional target portions for RNAi to inhibit influenza virus.
tcttcaaacattgaagata

SEQ ID NO: 781 - DNA, 19 bp, Artificial
  Sequences of functional target portions for RNAi to inhibit influenza virus.
cttcaaacattgaagataa

SEQ ID NO: 782 - DNA, 19 bp, Artificial
  Sequences of functional target portions for RNAi to inhibit influenza virus.
aaacattgaagataagagt

SEQ ID NO: 783 - DNA, 19 bp, Artificial
  Sequences of functional target portions for RNAi to inhibit influenza virus.
attgaagataagagtgcat

SEQ ID NO: 784 - DNA, 19 bp, Artificial
  Sequences of functional target portions for RNAi to inhibit influenza virus.
tgaagataagagtgcatga

SEQ ID NO: 785 - DNA, 19 bp, Artificial
  Sequences of functional target portions for RNAi to inhibit influenza virus.
gataagagtgcatgaggga

SEQ ID NO: 786 - DNA, 19 bp, Artificial
  Sequences of functional target portions for RNAi to inhibit influenza virus.
taagagtgcatgagggata

SEQ ID NO: 787 - DNA, 19 bp, Artificial
  Sequences of functional target portions for RNAi to inhibit influenza virus.
tgagggatatgaagagttc

SEQ ID NO: 788 - DNA, 19 bp, Artificial
  Sequences of functional target portions for RNAi to inhibit influenza virus.
ggatatgaagagttcacaa

SEQ ID NO: 789 - DNA, 19 bp, Artificial
  Sequences of functional target portions for RNAi to inhibit influenza virus.
gatatgaagagttcacaat

SEQ ID NO: 790 - DNA, 19 bp, Artificial
  Sequences of functional target portions for RNAi to inhibit influenza virus.
gttcacaatggttgggaga

SEQ ID NO: 791 - DNA, 19 bp, Artificial
  Sequences of functional target portions for RNAi to inhibit influenza virus.
tcacaatggttgggagaag

SEQ ID NO: 792 - DNA, 19 bp, Artificial
  Sequences of functional target portions for RNAi to inhibit influenza virus.
cacaatggttgggagaaga

SEQ ID NO: 793 - DNA, 19 bp, Artificial
  Sequences of functional target portions for RNAi to inhibit influenza virus.
atggttgggagaagagcaa

SEQ ID NO: 794 - DNA, 19 bp, Artificial
  Sequences of functional target portions for RNAi to inhibit influenza virus.
ggttgggagaagagcaaca

SEQ ID NO: 795 - DNA, 19 bp, Artificial
  Sequences of functional target portions for RNAi to inhibit influenza virus.
gggagaagagcaacagcca

SEQ ID NO: 796 - DNA, 19 bp, Artificial
  Sequences of functional target portions for RNAi to inhibit influenza virus.
ggagaagagcaacagccat

SEQ ID NO: 797 - DNA, 19 bp, Artificial
  Sequences of functional target portions for RNAi to inhibit influenza virus.
gagaagagcaacagccata

SEQ ID NO: 798 - DNA, 19 bp, Artificial
  Sequences of functional target portions for RNAi to inhibit influenza virus.
caacagccatactcagaaa

SEQ ID NO: 799 - DNA, 19 bp, Artificial
  Sequences of functional target portions for RNAi to inhibit influenza virus.
cagaaaagcaaccaggaga

SEQ ID NO: 800 - DNA, 19 bp, Artificial
  Sequences of functional target portions for RNAi to inhibit influenza virus.
agaaaagcaaccaggagat

SEQ ID NO: 801 - DNA, 19 bp, Artificial
  Sequences of functional target portions for RNAi to inhibit influenza virus.
aaagcaaccaggagattga

SEQ ID NO: 802 - DNA, 19 bp, Artificial
  Sequences of functional target portions for RNAi to inhibit influenza virus.
caaccaggagattgattca

SEQ ID NO: 803 - DNA, 19 bp, Artificial
  Sequences of functional target portions for RNAi to inhibit influenza virus.
ggagattgattcagctgat

SEQ ID NO: 804 - DNA, 19 bp, Artificial
  Sequences of functional target portions for RNAi to inhibit influenza virus.
gagattgattcagctgata

SEQ ID NO: 805 - DNA, 19 bp, Artificial
  Sequences of functional target portions for RNAi to inhibit influenza virus.
gctgatagtgagtgggaga

SEQ ID NO: 806 - DNA, 19 bp, Artificial
  Sequences of functional target portions for RNAi to inhibit influenza virus.
tgatagtgagtgggagaga

SEQ ID NO: 807 - DNA, 19 bp, Artificial
  Sequences of functional target portions for RNAi to inhibit influenza virus.
agtgagtgggagagacgaa

SEQ ID NO: 808 - DNA, 19 bp, Artificial
  Sequences of functional target portions for RNAi to inhibit influenza virus.
ggagagacgaacagtcgat

SEQ ID NO: 809 - DNA, 19 bp, Artificial
  Sequences of functional target portions for RNAi to inhibit influenza virus.
cgaacagtcgattgccgaa

SEQ ID NO: 810 - DNA, 19 bp, Artificial
  Sequences of functional target portions for RNAi to inhibit influenza virus.
agtcgattgccgaagcaat

SEQ ID NO: 811 - DNA, 19 bp, Artificial
  Sequences of functional target portions for RNAi to inhibit influenza virus.
gtcgattgccgaagcaata

SEQ ID NO: 812 - DNA, 19 bp, Artificial
  Sequences of functional target portions for RNAi to inhibit influenza virus.
aagcaataattgtggccat

SEQ ID NO: 813 - DNA, 19 bp, Artificial
  Sequences of functional target portions for RNAi to inhibit influenza virus.
taattgtggccatggtatt

SEQ ID NO: 814 - DNA, 19 bp, Artificial
  Sequences of functional target portions for RNAi to inhibit influenza virus.
tttcacaagaggattgtat

SEQ ID NO: 815 - DNA, 19 bp, Artificial
  Sequences of functional target portions for RNAi to inhibit influenza virus.
tcacaagaggattgtatga

SEQ ID NO: 816 - DNA, 19 bp, Artificial
  Sequences of functional target portions for RNAi to inhibit influenza virus.
acaagaggattgtatgata

SEQ ID NO: 817 - DNA, 19 bp, Artificial
  Sequences of functional target portions for RNAi to inhibit influenza virus.
caagaggattgtatgataa

SEQ ID NO: 818 - DNA, 19 bp, Artificial
  Sequences of functional target portions for RNAi to inhibit influenza virus.
aagaggattgtatgataaa

SEQ ID NO: 819 - DNA, 19 bp, Artificial
  Sequences of functional target portions for RNAi to inhibit influenza virus.
agtcagaggtgatctgaat

SEQ ID NO: 820 - DNA, 19 bp, Artificial
  Sequences of functional target portions for RNAi to inhibit influenza virus.
tcagaggtgatctgaattt

SEQ ID NO: 821 - DNA, 19 bp, Artificial
  Sequences of functional target portions for RNAi to inhibit influenza virus.
gatctgaatttcgtcaata

SEQ ID NO: 822 - DNA, 19 bp, Artificial
  Sequences of functional target portions for RNAi to inhibit influenza virus.
caatagggcgaatcagcga

SEQ ID NO: 823 - DNA, 19 bp, Artificial
  Sequences of functional target portions for RNAi to inhibit influenza virus.
aatcagcgattgaatccta

SEQ ID NO: 824 - DNA, 19 bp, Artificial
  Sequences of functional target portions for RNAi to inhibit influenza virus.
gcgattgaatcctatgcat

SEQ ID NO: 825 - DNA, 19 bp, Artificial
  Sequences of functional target portions for RNAi to inhibit influenza virus.
gattgaatcctatgcatca

SEQ ID NO: 826 - DNA, 19 bp, Artificial
  Sequences of functional target portions for RNAi to inhibit influenza virus.
gcatcaacttttaagacat

SEQ ID NO: 827 - DNA, 19 bp, Artificial
  Sequences of functional target portions for RNAi to inhibit influenza virus.
catcaacttttaagacatt

SEQ ID NO: 828 - DNA, 19 bp, Artificial
  Sequences of functional target portions for RNAi to inhibit influenza virus.
gaaggatgcgaaagtgctt

SEQ ID NO: 829 - DNA, 19 bp, Artificial
  Sequences of functional target portions for RNAi to inhibit influenza virus.
gcgaaagtgctttttcaaa

SEQ ID NO: 830 - DNA, 19 bp, Artificial
  Sequences of functional target portions for RNAi to inhibit influenza virus.
cgaaagtgctttttcaaaa

SEQ ID NO: 831 - DNA, 19 bp, Artificial
  Sequences of functional target portions for RNAi to inhibit influenza virus.
ggagttgaacctatcgaca

SEQ ID NO: 832 - DNA, 19 bp, Artificial
  Sequences of functional target portions for RNAi to inhibit influenza virus.
gagttgaacctatcgacaa

SEQ ID NO: 833 - DNA, 19 bp, Artificial
  Sequences of functional target portions for RNAi to inhibit influenza virus.
agttgaacctatcgacaat

SEQ ID NO: 834 - DNA, 19 bp, Artificial
  Sequences of functional target portions for RNAi to inhibit influenza virus.
gaacctatcgacaatgtga

SEQ ID NO: 835 - DNA, 19 bp, Artificial
  Sequences of functional target portions for RNAi to inhibit influenza virus.
tcgacaatgtgatgggaat

SEQ ID NO: 836 - DNA, 19 bp, Artificial
  Sequences of functional target portions for RNAi to inhibit influenza virus.
caatgtgatgggaatgatt

SEQ ID NO: 837 - DNA, 19 bp, Artificial
  Sequences of functional target portions for RNAi to inhibit influenza virus.
gatgggaatgattgggata

SEQ ID NO: 838 - DNA, 19 bp, Artificial
  Sequences of functional target portions for RNAi to inhibit influenza virus.
tgggaatgattgggatatt

SEQ ID NO: 839 - DNA, 19 bp, Artificial
  Sequences of functional target portions for RNAi to inhibit influenza virus.
tgattgggatattgccaga

SEQ ID NO: 840 - DNA, 19 bp, Artificial
  Sequences of functional target portions for RNAi to inhibit influenza virus.
ggatattgccagacatgac

SEQ ID NO: 841 - DNA, 19 bp, Artificial
  Sequences of functional target portions for RNAi to inhibit influenza virus.
agacatgactccaagcatc

SEQ ID NO: 842 - DNA, 19 bp, Artificial
  Sequences of functional target portions for RNAi to inhibit influenza virus.
ccaagcatcgagatgtcaa

SEQ ID NO: 843 - DNA, 19 bp, Artificial
  Sequences of functional target portions for RNAi to inhibit influenza virus.
gtcaatgagaggagtgaga

SEQ ID NO: 844 - DNA, 19 bp, Artificial
  Sequences of functional target portions for RNAi to inhibit influenza virus.
caatgagaggagtgagaat

SEQ ID NO: 845 - DNA, 19 bp, Artificial
  Sequences of functional target portions for RNAi to inhibit influenza virus.
atgagaggagtgagaatca

SEQ ID NO: 846 - DNA, 19 bp, Artificial
  Sequences of functional target portions for RNAi to inhibit influenza virus.
gaggagtgagaatcagcaa

SEQ ID NO: 847 - DNA, 19 bp, Artificial
  Sequences of functional target portions for RNAi to inhibit influenza virus.
aggagtgagaatcagcaaa

SEQ ID NO: 848 - DNA, 19 bp, Artificial
  Sequences of functional target portions for RNAi to inhibit influenza virus.
ggagtgagaatcagcaaaa

SEQ ID NO: 849 - DNA, 19 bp, Artificial
  Sequences of functional target portions for RNAi to inhibit influenza virus.
cagcaaaatgggtgtagat

SEQ ID NO: 850 - DNA, 19 bp, Artificial
  Sequences of functional target portions for RNAi to inhibit influenza virus.
gcaaaatgggtgtagatga

SEQ ID NO: 851 - DNA, 19 bp, Artificial
  Sequences of functional target portions for RNAi to inhibit influenza virus.
caaaatgggtgtagatgag

SEQ ID NO: 852 - DNA, 19 bp, Artificial
  Sequences of functional target portions for RNAi to inhibit influenza virus.
aaatgggtgtagatgagta

SEQ ID NO: 853 - DNA, 19 bp, Artificial
  Sequences of functional target portions for RNAi to inhibit influenza virus.
cggagagggtagtggtgag

SEQ ID NO: 854 - DNA, 19 bp, Artificial
  Sequences of functional target portions for RNAi to inhibit influenza virus.
agagggtagtggtgagcat

SEQ ID NO: 855 - DNA, 19 bp, Artificial
  Sequences of functional target portions for RNAi to inhibit influenza virus.
gggtagtggtgagcattga

SEQ ID NO: 856 - DNA, 19 bp, Artificial
  Sequences of functional target portions for RNAi to inhibit influenza virus.
tggtgagcattgaccgttt

SEQ ID NO: 857 - DNA, 19 bp, Artificial
  Sequences of functional target portions for RNAi to inhibit influenza virus.
ccgggaccaacgaggaaat

SEQ ID NO: 858 - DNA, 19 bp, Artificial
  Sequences of functional target portions for RNAi to inhibit influenza virus.
ggaccaacgaggaaatgta

SEQ ID NO: 859 - DNA, 19 bp, Artificial
  Sequences of functional target portions for RNAi to inhibit influenza virus.
ccaacgaggaaatgtacta

SEQ ID NO: 860 - DNA, 19 bp, Artificial
  Sequences of functional target portions for RNAi to inhibit influenza virus.
aggaaatgtactactgtct

SEQ ID NO: 861 - DNA, 19 bp, Artificial
  Sequences of functional target portions for RNAi to inhibit influenza virus.
cccgaggaggtcagtgaaa

SEQ ID NO: 862 - DNA, 19 bp, Artificial
  Sequences of functional target portions for RNAi to inhibit influenza virus.
cgaggaggtcagtgaaaca

SEQ ID NO: 863 - DNA, 19 bp, Artificial
  Sequences of functional target portions for RNAi to inhibit influenza virus.
ggtcagtgaaacacaggga

SEQ ID NO: 864 - DNA, 19 bp, Artificial
  Sequences of functional target portions for RNAi to inhibit influenza virus.
cagtgaaacacagggaaca

SEQ ID NO: 865 - DNA, 19 bp, Artificial
  Sequences of functional target portions for RNAi to inhibit influenza virus.
gaaacacagggaacagaga

SEQ ID NO: 866 - DNA, 19 bp, Artificial
  Sequences of functional target portions for RNAi to inhibit influenza virus.
aaacacagggaacagagaa

SEQ ID NO: 867 - DNA, 19 bp, Artificial
  Sequences of functional target portions for RNAi to inhibit influenza virus.
aacacagggaacagagaaa

SEQ ID NO: 868 - DNA, 19 bp, Artificial
  Sequences of functional target portions for RNAi to inhibit influenza virus.
gggaacagagaaactgaca

SEQ ID NO: 869 - DNA, 19 bp, Artificial
  Sequences of functional target portions for RNAi to inhibit influenza virus.
ggaacagagaaactgacaa

SEQ ID NO: 870 - DNA, 19 bp, Artificial
  Sequences of functional target portions for RNAi to inhibit influenza virus.
gaacagagaaactgacaat

SEQ ID NO: 871 - DNA, 19 bp, Artificial
  Sequences of functional target portions for RNAi to inhibit influenza virus.
acagagaaactgacaataa

SEQ ID NO: 872 - DNA, 19 bp, Artificial
  Sequences of functional target portions for RNAi to inhibit influenza virus.
cagagaaactgacaataac

SEQ ID NO: 873 - DNA, 19 bp, Artificial
  Sequences of functional target portions for RNAi to inhibit influenza virus.
gagaaactgacaataactt

SEQ ID NO: 874 - DNA, 19 bp, Sequences of functional target portions for RNAi to inhibit influenza virus.
agaaactgacaataactta

SEQ ID NO: 875 - DNA, 19 bp, Artificial
  Sequences of functional target portions for RNAi to inhibit influenza virus.
ataacttactcatcgtcaa

SEQ ID NO: 876 - DNA, 19 bp, Artificial
  Sequences of functional target portions for RNAi to inhibit influenza virus.
tcgtcaatgatgtgggaga

SEQ ID NO: 877 - DNA, 19 bp, Artificial
  Sequences of functional target portions for RNAi to inhibit influenza virus.
cgtcaatgatgtgggagat

SEQ ID NO: 878 - DNA, 19 bp, Artificial
  Sequences of functional target portions for RNAi to inhibit influenza virus.
tcaatgatgtgggagatta

SEQ ID NO: 879 - DNA, 19 bp, Artificial
  Sequences of functional target portions for RNAi to inhibit influenza virus.
caatgatgtgggagattaa

SEQ ID NO: 880 - DNA, 19 bp, Artificial
  Sequences of functional target portions for RNAi to inhibit influenza virus.
ggagattaatggtcctgaa

SEQ ID NO: 881 - DNA, 19 bp, Artificial
  Sequences of functional target portions for RNAi to inhibit influenza virus.
gagattaatggtcctgaat

SEQ ID NO: 882 - DNA, 19 bp, Artificial
  Sequences of functional target portions for RNAi to inhibit influenza virus.
gattaatggtcctgaatca

SEQ ID NO: 883 - DNA, 19 bp, Artificial
  Sequences of functional target portions for RNAi to inhibit influenza virus.
ctgaatcagtgttggtcaa

SEQ ID NO: 884 - DNA, 19 bp, Artificial
  Sequences of functional target portions for RNAi to inhibit influenza virus.
gaatcagtgttggtcaata

SEQ ID NO: 885 - DNA, 19 bp, Artificial
  Sequences of functional target portions for RNAi to inhibit influenza virus.
aatcagtgttggtcaatac

SEQ ID NO: 886 - DNA, 19 bp, Artificial
  Sequences of functional target portions for RNAi to inhibit influenza virus.
cagtgttggtcaataccta

SEQ ID NO: 887 - DNA, 19 bp, Artificial
  Sequences of functional target portions for RNAi to inhibit influenza virus.
tatcaatggatcatcagaa

SEQ ID NO: 888 - DNA, 19 bp, Artificial
  Sequences of functional target portions for RNAi to inhibit influenza virus.
atcaatggatcatcagaaa

SEQ ID NO: 889 - DNA, 19 bp, Artificial
  Sequences of functional target portions for RNAi to inhibit influenza virus.
caatggatcatcagaaact

SEQ ID NO: 890 - DNA, 19 bp, Artificial
  Sequences of functional target portions for RNAi to inhibit influenza virus.
gatcatcagaaactgggaa

SEQ ID NO: 891 - DNA, 19 bp, Artificial
  Sequences of functional target portions for RNAi to inhibit influenza virus.
atcatcagaaactgggaaa

SEQ ID NO: 892 - DNA, 19 bp, Artificial
  Sequences of functional target portions for RNAi to inhibit influenza virus.
catcagaaactgggaaact

SEQ ID NO: 893 - DNA, 19 bp, Artificial
  Sequences of functional target portions for RNAi to inhibit influenza virus.
agaaactgggaaactgtta

SEQ ID NO: 894 - DNA, 19 bp, Artificial
  Sequences of functional target portions for RNAi to inhibit influenza virus.
gaaactgggaaactgttaa

SEQ ID NO: 895 - DNA, 19 bp, Artificial
  Sequences of functional target portions for RNAi to inhibit influenza virus.
aaactgggaaactgttaaa

SEQ ID NO: 896 - DNA, 19 bp, Artificial
  Sequences of functional target portions for RNAi to inhibit influenza virus.
ctgggaaactgttaaaatt

SEQ ID NO: 897 - DNA, 19 bp, Artificial
  Sequences of functional target portions for RNAi to inhibit influenza virus.
gggaaactgttaaaattca

SEQ ID NO: 898 - DNA, 19 bp, Artificial
  Sequences of functional target portions for RNAi to inhibit influenza virus.
ccagaaccctacaatgcta

SEQ ID NO: 899 - DNA, 19 bp, Artificial
  Sequences of functional target portions for RNAi to inhibit influenza virus.
cctacaatgctatacaata

SEQ ID NO: 900 - DNA, 19 bp, Artificial
  Sequences of functional target portions for RNAi to inhibit influenza virus.
ctacaatgctatacaataa

SEQ ID NO: 901 - DNA, 19 bp, Artificial
  Sequences of functional target portions for RNAi to inhibit influenza virus.
acaataaaatggaatttga

SEQ ID NO: 902 - DNA, 19 bp, Artificial
  Sequences of functional target portions for RNAi to inhibit influenza virus.
caataaaatggaatttgaa

SEQ ID NO: 903 - DNA, 19 bp, Artificial
  Sequences of functional target portions for RNAi to inhibit influenza virus.
taaaatggaatttgaacca

SEQ ID NO: 904 - DNA, 19 bp, Artificial
  Sequences of functional target portions for RNAi to inhibit influenza virus.
aaatggaatttgaaccatt

SEQ ID NO: 905 - DNA, 19 bp, Artificial
  Sequences of functional target portions for RNAi to inhibit influenza virus.
ctttagtacctaaggccat

SEQ ID NO: 906 - DNA, 19 bp, Artificial
  Sequences of functional target portions for RNAi to inhibit influenza virus.
cattagaggccaatacagt

SEQ ID NO: 907 - DNA, 19 bp, Artificial
  Sequences of functional target portions for RNAi to inhibit influenza virus.
aggccaatacagtgggttt

SEQ ID NO: 908 - DNA, 19 bp, Artificial
  Sequences of functional target portions for RNAi to inhibit influenza virus.
caatacagtgggtttgtaa

SEQ ID NO: 909 - DNA, 19 bp, Artificial
  Sequences of functional target portions for RNAi to inhibit influenza virus.
atacagtgggtttgtaaga

SEQ ID NO: 910 - DNA, 19 bp, Artificial
  Sequences of functional target portions for RNAi to inhibit influenza virus.
tgtaagaactctgttccaa

SEQ ID NO: 911 - DNA, 19 bp, Artificial
  Sequences of functional target portions for RNAi to inhibit influenza virus.
gaactctgttccaacaaat

SEQ ID NO: 912 - DNA, 19 bp, Artificial
  Sequences of functional target portions for RNAi to inhibit influenza virus.
acaaatgagggatgtgctt

SEQ ID NO: 913 - DNA, 19 bp, Artificial
  Sequences of functional target portions for RNAi to inhibit influenza virus.
gagggatgtgcttgggaca

SEQ ID NO: 914 - DNA, 19 bp, Artificial
  Sequences of functional target portions for RNAi to inhibit influenza virus.
gggatgtgcttgggacatt

SEQ ID NO: 915 - DNA, 19 bp, Artificial
  Sequences of functional target portions for RNAi to inhibit influenza virus.
gtgcttgggacatttgata

SEQ ID NO: 916 - DNA, 19 bp, Artificial
  Sequences of functional target portions for RNAi to inhibit influenza virus.
ggacatttgataccgcaca

SEQ ID NO: 917 - DNA, 19 bp, Artificial
  Sequences of functional target portions for RNAi to inhibit influenza virus.
atttgataccgcacagata

SEQ ID NO: 918 - DNA, 19 bp, Artificial
  Sequences of functional target portions for RNAi to inhibit influenza virus.
tttgataccgcacagataa

SEQ ID NO: 919 - DNA, 19 bp, Artificial
  Sequences of functional target portions for RNAi to inhibit influenza virus.
gataccgcacagataataa

SEQ ID NO: 920 - DNA, 19 bp, Artificial
  Sequences of functional target portions for RNAi to inhibit influenza virus.
ccaccaaagcaaagtagaa

SEQ ID NO: 921 - DNA, 19 bp, Artificial
  Sequences of functional target portions for RNAi to inhibit influenza virus.
caccaaagcaaagtagaat

SEQ ID NO: 922 - DNA, 19 bp, Artificial
  Sequences of functional target portions for RNAi to inhibit influenza virus.
aagcaaagtagaatgcagt

SEQ ID NO: 923 - DNA, 19 bp, Artificial
  Sequences of functional target portions for RNAi to inhibit influenza virus.
atgcagttctcctcattta

SEQ ID NO: 924 - DNA, 19 bp, Artificial
  Sequences of functional target portions for RNAi to inhibit influenza virus.
cctcatttactgtgaatgt

SEQ ID NO: 925 - DNA, 19 bp, Artificial
  Sequences of functional target portions for RNAi to inhibit influenza virus.
ggggatcaggaatgagaat

SEQ ID NO: 926 - DNA, 19 bp, Artificial
  Sequences of functional target portions for RNAi to inhibit influenza virus.
gggatcaggaatgagaata

SEQ ID NO: 927 - DNA, 19 bp, Artificial
  Sequences of functional target portions for RNAi to inhibit influenza virus.
ggatcaggaatgagaatac

SEQ ID NO: 928 - DNA, 19 bp, Artificial
  Sequences of functional target portions for RNAi to inhibit influenza virus.
aggaatgagaatacttgta

SEQ ID NO: 929 - DNA, 19 bp, Artificial
  Sequences of functional target portions for RNAi to inhibit influenza virus.
ggaatgagaatacttgtaa

SEQ ID NO: 930 - DNA, 19 bp, Artificial
  Sequences of functional target portions for RNAi to inhibit influenza virus.
gggcaattctcctgtattc

SEQ ID NO: 931 - DNA, 19 bp, Artificial
  Sequences of functional target portions for RNAi to inhibit influenza virus.
ctgtattcaactataacaa

SEQ ID NO: 932 - DNA, 19 bp, Artificial
  Sequences of functional target portions for RNAi to inhibit influenza virus.
tataacaaggccacgaaga

SEQ ID NO: 933 - DNA, 19 bp, Artificial
  Sequences of functional target portions for RNAi to inhibit influenza virus.
taacaaggccacgaagaga

SEQ ID NO: 934 - DNA, 19 bp, Artificial
  Sequences of functional target portions for RNAi to inhibit influenza virus.
acgaagagactcacagttc

SEQ ID NO: 935 - DNA, 19 bp, Artificial
  Sequences of functional target portions for RNAi to inhibit influenza virus.
cgaagagactcacagttct

SEQ ID NO: 936 - DNA, 19 bp, Artificial
  Sequences of functional target portions for RNAi to inhibit influenza virus.
gactcacagttctcggaaa

SEQ ID NO: 937 - DNA, 19 bp, Artificial
  Sequences of functional target portions for RNAi to inhibit influenza virus.
actcacagttctcggaaag

SEQ ID NO: 938 - DNA, 19 bp, Artificial
  Sequences of functional target portions for RNAi to inhibit influenza virus.
cggaaaggatgctggcact

SEQ ID NO: 939 - DNA, 19 bp, Artificial
  Sequences of functional target portions for RNAi to inhibit influenza virus.
ggaaaggatgctggcactt

SEQ ID NO: 940 - DNA, 19 bp, Artificial
  Sequences of functional target portions for RNAi to inhibit influenza virus.
aaaggatgctggcacttta

SEQ ID NO: 941 - DNA, 19 bp, Artificial
  Sequences of functional target portions for RNAi to inhibit influenza virus.
cactttaactgaagaccca

SEQ ID NO: 942 - DNA, 19 bp, Artificial
  Sequences of functional target portions for RNAi to inhibit influenza virus.
aactgaagacccagatgaa

SEQ ID NO: 943 - DNA, 19 bp, Artificial
  Sequences of functional target portions for RNAi to inhibit influenza virus.
agacccagatgaaggcaca

SEQ ID NO: 944 - DNA, 19 bp, Artificial
  Sequences of functional target portions for RNAi to inhibit influenza virus.
agatgaaggcacagctgga

SEQ ID NO: 945 - DNA, 19 bp, Artificial
  Sequences of functional target portions for RNAi to inhibit influenza virus.
aggcacagctggagtggag

SEQ ID NO: 946 - DNA, 19 bp, Artificial
  Sequences of functional target portions for RNAi to inhibit influenza virus.
gattcctcattctgggcaa

SEQ ID NO: 947 - DNA, 19 bp, Artificial
  Sequences of functional target portions for RNAi to inhibit influenza virus.
cctcattctgggcaaagaa

SEQ ID NO: 948 - DNA, 19 bp, Artificial
  Sequences of functional target portions for RNAi to inhibit influenza virus.
gggcaaagaagacaagaga

SEQ ID NO: 949 - DNA, 19 bp, Artificial
  Sequences of functional target portions for RNAi to inhibit influenza virus.
ggcaaagaagacaagagat

SEQ ID NO: 950 - DNA, 19 bp, Artificial
  Sequences of functional target portions for RNAi to inhibit influenza virus.
gcaaagaagacaagagata

SEQ ID NO: 951 - DNA, 19 bp, Artificial
  Sequences of functional target portions for RNAi to inhibit influenza virus.
caaagaagacaagagatat

SEQ ID NO: 952 - DNA, 19 bp, Artificial
  Sequences of functional target portions for RNAi to inhibit influenza virus.
aaagaagacaagagatatg

SEQ ID NO: 953 - DNA, 19 bp, Artificial
  Sequences of functional target portions for RNAi to inhibit influenza virus.
agacaagagatatgggcca

SEQ ID NO: 954 - DNA, 19 bp, Artificial
  Sequences of functional target portions for RNAi to inhibit influenza virus.
gagatatgggccagcacta

SEQ ID NO: 955 - DNA, 19 bp, Artificial
  Sequences of functional target portions for RNAi to inhibit influenza virus.
agatatgggccagcactaa

SEQ ID NO: 956 - DNA, 19 bp, Artificial
  Sequences of functional target portions for RNAi to inhibit influenza virus.
gggccagcactaagcatca

SEQ ID NO: 957 - DNA, 19 bp, Artificial
  Sequences of functional target portions for RNAi to inhibit influenza virus.
gcactaagcatcaatgaac

SEQ ID NO: 958 - DNA, 19 bp, Artificial
  Sequences of functional target portions for RNAi to inhibit influenza virus.
gcatcaatgaactgagcaa

SEQ ID NO: 959 - DNA, 19 bp, Artificial
  Sequences of functional target portions for RNAi to inhibit influenza virus.
actgagcaaccttgcgaaa

SEQ ID NO: 960 - DNA, 19 bp, Artificial
  Sequences of functional target portions for RNAi to inhibit influenza virus.
gcgaaaggagagaaggcta

SEQ ID NO: 961 - DNA, 19 bp, Artificial
  Sequences of functional target portions for RNAi to inhibit influenza virus.
cgaaaggagagaaggctaa

SEQ ID NO: 962 - DNA, 19 bp, Artificial
  Sequences of functional target portions for RNAi to inhibit influenza virus.
agagaaggctaatgtgcta

SEQ ID NO: 963 - DNA, 19 bp, Artificial
  Sequences of functional target portions for RNAi to inhibit influenza virus.
ctaatgtgctaattgggca

SEQ ID NO: 964 - DNA, 19 bp, Artificial
  Sequences of functional target portions for RNAi to inhibit influenza virus.
taatgtgctaattgggcaa

SEQ ID NO: 965 - DNA, 19 bp, Artificial
  Sequences of functional target portions for RNAi to inhibit influenza virus.
gctaattgggcaaggagac

SEQ ID NO: 966 - DNA, 19 bp, Artificial
  Sequences of functional target portions for RNAi to inhibit influenza virus.
ggcaaggagacgtggtgtt

SEQ ID NO: 967 - DNA, 19 bp, Artificial
  Sequences of functional target portions for RNAi to inhibit influenza virus.
ggagacgtggtgttggtaa

SEQ ID NO: 968 - DNA, 19 bp, Artificial
  Sequences of functional target portions for RNAi to inhibit influenza virus.
gagacgtggtgttggtaat

SEQ ID NO: 969 - DNA, 19 bp, Artificial
  Sequences of functional target portions for RNAi to inhibit influenza virus.
acgtggtgttggtaatgaa

SEQ ID NO: 970 - DNA, 19 bp, Artificial
  Sequences of functional target portions for RNAi to inhibit influenza virus.
tgttggtaatgaaacggaa

SEQ ID NO: 971 - DNA, 19 bp, Artificial
  Sequences of functional target portions for RNAi to inhibit influenza virus.
gttggtaatgaaacggaaa

SEQ ID NO: 972 - DNA, 19 bp, Artificial
  Sequences of functional target portions for RNAi to inhibit influenza virus.
ggaaacgggactctagcat

SEQ ID NO: 973 - DNA, 19 bp, Artificial
  Sequences of functional target portions for RNAi to inhibit influenza virus.
gaaacgggactctagcata

SEQ ID NO: 974 - DNA, 19 bp, Artificial
  Sequences of functional target portions for RNAi to inhibit influenza virus.
aaacgggactctagcatac

SEQ ID NO: 975 - DNA, 19 bp, Artificial
  Sequences of functional target portions for RNAi to inhibit influenza virus.
cgggactctagcatactta

SEQ ID NO: 976 - DNA, 19 bp, Artificial
  Sequences of functional target portions for RNAi to inhibit influenza virus.
actgacagccagacagcga

SEQ ID NO: 977 - DNA, 19 bp, Artificial
  Sequences of functional target portions for RNAi to inhibit influenza virus.
agacagcgaccaaaagaat

SEQ ID NO: 978 - DNA, 19 bp, Artificial
  Sequences of functional target portions for RNAi to inhibit influenza virus.
gccatcaattagtgtcgaa

SEQ ID NO: 979 - DNA, 19 bp, Artificial
  Sequences of functional target portions for RNAi to inhibit influenza virus.
catcaattagtgtcgaata

SEQ ID NO: 980 - DNA, 19 bp, Artificial
  Sequences of functional target portions for RNAi to inhibit influenza virus.
caattagtgtcgaatagtt

SEQ ID NO: 981 - DNA, 19 bp, Artificial
  Sequences of functional target portions for RNAi to inhibit influenza virus.
aattagtgtcgaatagttt

SEQ ID NO: 982 - DNA, 19 bp, Artificial
  Sequences of functional target portions for RNAi to inhibit influenza virus.
gtgtcgaatagtttaaaaa

SEQ ID NO: 983 - DNA, 19 bp, Artificial
  Sequences of functional target portions for RNAi to inhibit influenza virus.
tcgaatagtttaaaaacga

SEQ ID NO: 984 - DNA, 19 bp, Artificial
  Sequences of functional target portions for RNAi to inhibit influenza virus.
gcgaaagcaggcaaaccat

SEQ ID NO: 985 - DNA, 19 bp, Artificial
  Sequences of functional target portions for RNAi to inhibit influenza virus.
cgaaagcaggcaaaccatt

SEQ ID NO: 986 - DNA, 19 bp, Artificial
  Sequences of functional target portions for RNAi to inhibit influenza virus.
gaaagcaggcaaaccattt

SEQ ID NO: 987 - DNA, 19 bp, Artificial
  Sequences of functional target portions for RNAi to inhibit influenza virus.
aggcaaaccatttgaatgg

SEQ ID NO: 988 - DNA, 19 bp, Artificial
  Sequences of functional target portions for RNAi to inhibit influenza virus.
gcaaaccatttgaatggat

SEQ ID NO: 989 - DNA, 19 bp, Artificial
  Sequences of functional target portions for RNAi to inhibit influenza virus.
ccatttgaatggatgtcaa

SEQ ID NO: 990 - DNA, 19 bp, Artificial
  Sequences of functional target portions for RNAi to inhibit influenza virus.
catttgaatggatgtcaat

SEQ ID NO: 991 - DNA, 19 bp, Artificial
  Sequences of functional target portions for RNAi to inhibit influenza virus.
cgaccttacttttcttaaa

SEQ ID NO: 992 - DNA, 19 bp, Artificial
  Sequences of functional target portions for RNAi to inhibit influenza virus.
cttaaaagtgccagcacaa

SEQ ID NO: 993 - DNA, 19 bp, Artificial
  Sequences of functional target portions for RNAi to inhibit influenza virus.
taaaagtgccagcacaaaa

SEQ ID NO: 994 - DNA, 19 bp, Artificial
  Sequences of functional target portions for RNAi to inhibit influenza virus.
gcacaaaatgctataagca

SEQ ID NO: 995 - DNA, 19 bp, Artificial
  Sequences of functional target portions for RNAi to inhibit influenza virus.
acaaaatgctataagcaca

SEQ ID NO: 996 - DNA, 19 bp, Artificial
  Sequences of functional target portions for RNAi to inhibit influenza virus.
caaaatgctataagcacaa

SEQ ID NO: 997 - DNA, 19 bp, Artificial
  Sequences of functional target portions for RNAi to inhibit influenza virus.
aagcacaactttcccttat

SEQ ID NO: 998 - DNA, 19 bp, Artificial
  Sequences of functional target portions for RNAi to inhibit influenza virus.
cagccatgggacaggaaca

SEQ ID NO: 999 - DNA, 19 bp, Artificial
  Sequences of functional target portions for RNAi to inhibit influenza virus.
acaggatacaccatggata

SEQ ID NO: 1000 - DNA, 19 bp, Artificial
  Sequences of functional target portions for RNAi to inhibit influenza virus.
caggatacaccatggatac

SEQ ID NO: 1001 - DNA, 19 bp, Artificial
  Sequences of functional target portions for RNAi to inhibit influenza virus.
ggatactgtcaacaggaca

SEQ ID NO: 1002 - DNA, 19 bp, Artificial
  Sequences of functional target portions for RNAi to inhibit influenza virus.
caacaggacacatcagtac

SEQ ID NO: 1003 - DNA, 19 bp, Artificial
  Sequences of functional target portions for RNAi to inhibit influenza virus.
ggacacatcagtactcaga

SEQ ID NO: 1004 - DNA, 19 bp, Artificial
  Sequences of functional target portions for RNAi to inhibit influenza virus.
acacatcagtactcagaaa

SEQ ID NO: 1005 - DNA, 19 bp, Artificial
  Sequences of functional target portions for RNAi to inhibit influenza virus.
agaaaagggaagatggaca

SEQ ID NO: 1006 - DNA, 19 bp, Artificial
  Sequences of functional target portions for RNAi to inhibit influenza virus.
gaaaagggaagatggacaa

SEQ ID NO: 1007 - DNA, 19 bp, Artificial
  Sequences of functional target portions for RNAi to inhibit influenza virus.
aagggaagatggacaacaa

SEQ ID NO: 1008 - DNA, 19 bp, Artificial
  Sequences of functional target portions for RNAi to inhibit influenza virus.
agggaagatggacaacaaa

SEQ ID NO: 1009 - DNA, 19 bp, Artificial
  Sequences of functional target portions for RNAi to inhibit influenza virus.
gggaagatggacaacaaac

SEQ ID NO: 1010 - DNA, 19 bp, Artificial
  Sequences of functional target portions for RNAi to inhibit influenza virus.
ggaagatggacaacaaaca

SEQ ID NO: 1011 - DNA, 19 bp, Artificial
  Sequences of functional target portions for RNAi to inhibit influenza virus.
tggacaacaaacaccgaaa

SEQ ID NO: 1012 - DNA, 19 bp, Artificial
  Sequences of functional target portions for RNAi to inhibit influenza virus.
cgaaactggagcaccgcaa

SEQ ID NO: 1013 - DNA, 19 bp, Artificial
  Sequences of functional target portions for RNAi to inhibit influenza virus.
ggccactgccagaagacaa

SEQ ID NO: 1014 - DNA, 19 bp, Artificial
  Sequences of functional target portions for RNAi to inhibit influenza virus.
gccagaagacaatgaacca

SEQ ID NO: 1015 - DNA, 19 bp, Artificial
  Sequences of functional target portions for RNAi to inhibit influenza virus.
ccagaagacaatgaaccaa

SEQ ID NO: 1016 - DNA, 19 bp, Artificial
  Sequences of functional target portions for RNAi to inhibit influenza virus.
gacaatgaaccaagtggtt

SEQ ID NO: 1017 - DNA, 19 bp, Artificial
  Sequences of functional target portions for RNAi to inhibit influenza virus.
acaatgaaccaagtggtta

SEQ ID NO: 1018 - DNA, 19 bp, Artificial
  Sequences of functional target portions for RNAi to inhibit influenza virus.
caatgaaccaagtggttat

SEQ ID NO: 1019 - DNA, 19 bp, Artificial
  Sequences of functional target portions for RNAi to inhibit influenza virus.
accaagtggttatgcccaa

SEQ ID NO: 1020 - DNA, 19 bp, Artificial
  Sequences of functional target portions for RNAi to inhibit influenza virus.
ccaagtggttatgcccaaa

SEQ ID NO: 1021 - DNA, 19 bp, Artificial
  Sequences of functional target portions for RNAi to inhibit influenza virus.
ggttatgcccaaacagatt

SEQ ID NO: 1022 - DNA, 19 bp, Artificial
  Sequences of functional target portions for RNAi to inhibit influenza virus.
gcccaaacagattgtgtat

SEQ ID NO: 1023 - DNA, 19 bp, Artificial
  Sequences of functional target portions for RNAi to inhibit influenza virus.
ccaaacagattgtgtattg

SEQ ID NO: 1024 - DNA, 19 bp, Artificial
  Sequences of functional target portions for RNAi to inhibit influenza virus.
tattggaagcaatggcttt

SEQ ID NO: 1025 - DNA, 19 bp, Artificial
  Sequences of functional target portions for RNAi to inhibit influenza virus.
aagcaatggctttccttga

SEQ ID NO: 1026 - DNA, 19 bp, Artificial
  Sequences of functional target portions for RNAi to inhibit influenza virus.
tggctttccttgaggaatc

SEQ ID NO: 1027 - DNA, 19 bp, Artificial
  Sequences of functional target portions for RNAi to inhibit influenza virus.
ggaatcccatcctggtatt

SEQ ID NO: 1028 - DNA, 19 bp, Artificial
  Sequences of functional target portions for RNAi to inhibit influenza virus.
gaaaactcgtgtattgaaa

SEQ ID NO: 1029 - DNA, 19 bp, Artificial
  Sequences of functional target portions for RNAi to inhibit influenza virus.
gtattgaaacgatggaggt

SEQ ID NO: 1030 - DNA, 19 bp, Artificial
  Sequences of functional target portions for RNAi to inhibit influenza virus.
ttgaaacgatggaggttgt

SEQ ID NO: 1031 - DNA, 19 bp, Artificial
  Sequences of functional target portions for RNAi to inhibit influenza virus.
aaacgatggaggttgttca

SEQ ID NO: 1032 - DNA, 19 bp, Artificial
  Sequences of functional target portions for RNAi to inhibit influenza virus.
cgatggaggttgttcagca

SEQ ID NO: 1033 - DNA, 19 bp, Artificial
  Sequences of functional target portions for RNAi to inhibit influenza virus.
gatggaggttgttcagcaa

SEQ ID NO: 1034 - DNA, 19 bp, Artificial
  Sequences of functional target portions for RNAi to inhibit influenza virus.
cagcaaacacgagtagaca

SEQ ID NO: 1035 - DNA, 19 bp, Artificial
  Sequences of functional target portions for RNAi to inhibit influenza virus.
agcaaacacgagtagacaa

SEQ ID NO: 1036 - DNA, 19 bp, Artificial
  Sequences of functional target portions for RNAi to inhibit influenza virus.
gcaaacacgagtagacaag

SEQ ID NO: 1037 - DNA, 19 bp, Artificial
  Sequences of functional target portions for RNAi to inhibit influenza virus.
gagtagacaagctgacaca

SEQ ID NO: 1038 - DNA, 19 bp, Artificial
  Sequences of functional target portions for RNAi to inhibit influenza virus.
cacaaggccgacagaccta

SEQ ID NO: 1039 - DNA, 19 bp, Artificial
  Sequences of functional target portions for RNAi to inhibit influenza virus.
acctatgactggactctaa

SEQ ID NO: 1040 - DNA, 19 bp, Artificial
  Sequences of functional target portions for RNAi to inhibit influenza virus.
tgactggactctaaataga

SEQ ID NO: 1041 - DNA, 19 bp, Artificial
  Sequences of functional target portions for RNAi to inhibit influenza virus.
actggactctaaatagaaa

SEQ ID NO: 1042 - DNA, 19 bp, Artificial
  Sequences of functional target portions for RNAi to inhibit influenza virus.
gactctaaatagaaaccaa

SEQ ID NO: 1043 - DNA, 19 bp, Artificial
  Sequences of functional target portions for RNAi to inhibit influenza virus.
aaaccaacctgctgcaaca

SEQ ID NO: 1044 - DNA, 19 bp, Artificial
  Sequences of functional target portions for RNAi to inhibit influenza virus.
ctgcaacagcattggccaa

SEQ ID NO: 1045 - DNA, 19 bp, Artificial
  Sequences of functional target portions for RNAi to inhibit influenza virus.
cagcattggccaacacaat

SEQ ID NO: 1046 - DNA, 19 bp, Artificial
  Sequences of functional target portions for RNAi to inhibit influenza virus.
ccaacacaatagaagtgtt

SEQ ID NO: 1047 - DNA, 19 bp, Artificial
  Sequences of functional target portions for RNAi to inhibit influenza virus.
caacacaatagaagtgttc

SEQ ID NO: 1048 - DNA, 19 bp, Artificial
  Sequences of functional target portions for RNAi to inhibit influenza virus.
caatagaagtgttcagatc

SEQ ID NO: 1049 - DNA, 19 bp, Artificial
  Sequences of functional target portions for RNAi to inhibit influenza virus.
atagaagtgttcagatcaa

SEQ ID NO: 1050 - DNA, 19 bp, Artificial
  Sequences of functional target portions for RNAi to inhibit influenza virus.
agaagtgttcagatcaaat

SEQ ID NO: 1051 - DNA, 19 bp, Artificial
  Sequences of functional target portions for RNAi to inhibit influenza virus.
tcaaatggcctcacggcca

SEQ ID NO: 1052 - DNA, 19 bp, Artificial
  Sequences of functional target portions for RNAi to inhibit influenza virus.
caaatggcctcacggccaa

SEQ ID NO: 1053 - DNA, 19 bp, Artificial
  Sequences of functional target portions for RNAi to inhibit influenza virus.
cctcacggccaatgagtct

SEQ ID NO: 1054 - DNA, 19 bp, Artificial
  Sequences of functional target portions for RNAi to inhibit influenza virus.
ctggaaggctcatagactt

SEQ ID NO: 1055 - DNA, 19 bp, Artificial
  Sequences of functional target portions for RNAi to inhibit influenza virus.
tcatagacttccttaagga

SEQ ID NO: 1056 - DNA, 19 bp, Artificial
  Sequences of functional target portions for RNAi to inhibit influenza virus.
tagacttccttaaggatgt

SEQ ID NO: 1057 - DNA, 19 bp, Artificial
  Sequences of functional target portions for RNAi to inhibit influenza virus.
aggatgtaatggagtcaat

SEQ ID NO: 1058 - DNA, 19 bp, Artificial
  Sequences of functional target portions for RNAi to inhibit influenza virus.
gatgtaatggagtcaatga

SEQ ID NO: 1059 - DNA, 19 bp, Artificial
  Sequences of functional target portions for RNAi to inhibit influenza virus.
atgtaatggagtcaatgaa

SEQ ID NO: 1060 - DNA, 19 bp, Artificial
  Sequences of functional target portions for RNAi to inhibit influenza virus.
tgtaatggagtcaatgaaa

SEQ ID NO: 1061 - DNA, 19 bp, Artificial
  Sequences of functional target portions for RNAi to inhibit influenza virus.
gtaatggagtcaatgaaaa

SEQ ID NO: 1062 - DNA, 19 bp, Artificial
  Sequences of functional target portions for RNAi to inhibit influenza virus.
taatggagtcaatgaaaaa

SEQ ID NO: 1063 - DNA, 19 bp, Artificial
  Sequences of functional target portions for RNAi to inhibit influenza virus.
agtcaatgaaaaaagaaga

SEQ ID NO: 1064 - DNA, 19 bp, Artificial
  Sequences of functional target portions for RNAi to inhibit influenza virus.
gtcaatgaaaaaagaagaa

SEQ ID NO: 1065 - DNA, 19 bp, Artificial
  Sequences of functional target portions for RNAi to inhibit influenza virus.
caatgaaaaaagaagaaat

SEQ ID NO: 1066 - DNA, 19 bp, Artificial
  Sequences of functional target portions for RNAi to inhibit influenza virus.
gaagaaatggggatcacaa

SEQ ID NO: 1067 - DNA, 19 bp, Artificial
  Sequences of functional target portions for RNAi to inhibit influenza virus.
caactcattttcagagaaa

SEQ ID NO: 1068 - DNA, 19 bp, Artificial
  Sequences of functional target portions for RNAi to inhibit influenza virus.
actcattttcagagaaaga

SEQ ID NO: 1069 - DNA, 19 bp, Artificial
  Sequences of functional target portions for RNAi to inhibit influenza virus.
cagagaaagagacgggtga

SEQ ID NO: 1070 - DNA, 19 bp, Artificial
  Sequences of functional target portions for RNAi to inhibit influenza virus.
gagaaagagacgggtgaga

SEQ ID NO: 1071 - DNA, 19 bp, Artificial
  Sequences of functional target portions for RNAi to inhibit influenza virus.
gaaagagacgggtgagaga

SEQ ID NO: 1072 - DNA, 19 bp, Artificial
  Sequences of functional target portions for RNAi to inhibit influenza virus.
aagagacgggtgagagaca

SEQ ID NO: 1073 - DNA, 19 bp, Artificial
  Sequences of functional target portions for RNAi to inhibit influenza virus.
gagacgggtgagagacaat

SEQ ID NO: 1074 - DNA, 19 bp, Artificial
  Sequences of functional target portions for RNAi to inhibit influenza virus.
ggtgagagacaatatgact

SEQ ID NO: 1075 - DNA, 19 bp, Artificial
  Sequences of functional target portions for RNAi to inhibit influenza virus.
gtgagagacaatatgacta

SEQ ID NO: 1076 - DNA, 19 bp, Artificial
  Sequences of functional target portions for RNAi to inhibit influenza virus.
tgagagacaatatgactaa

SEQ ID NO: 1077 - DNA, 19 bp, Artificial
  Sequences of functional target portions for RNAi to inhibit influenza virus.
agagacaatatgactaaga

SEQ ID NO: 1078 - DNA, 19 bp, Artificial
  Sequences of functional target portions for RNAi to inhibit influenza virus.
gagacaatatgactaagaa

SEQ ID NO: 1079 - DNA, 19 bp, Artificial
  Sequences of functional target portions for RNAi to inhibit influenza virus.
agacaatatgactaagaaa

SEQ ID NO: 1080 - DNA, 19 bp, Artificial
  Sequences of functional target portions for RNAi to inhibit influenza virus.
gacaatatgactaagaaaa

SEQ ID NO: 1081 - DNA, 19 bp, Artificial
  Sequences of functional target portions for RNAi to inhibit influenza virus.
acaatatgactaagaaaat

SEQ ID NO: 1082 - DNA, 19 bp, Artificial
  Sequences of functional target portions for RNAi to inhibit influenza virus.
atgactaagaaaatgataa

SEQ ID NO: 1083 - DNA, 19 bp, Artificial
  Sequences of functional target portions for RNAi to inhibit influenza virus.
ctaagaaaatgataacaca

SEQ ID NO: 1084 - DNA, 19 bp, Artificial
  Sequences of functional target portions for RNAi to inhibit influenza virus.
aagaaaatgataacacaga

SEQ ID NO: 1085 - DNA, 19 bp, Artificial
  Sequences of functional target portions for RNAi to inhibit influenza virus.
gaaaatgataacacagaga

SEQ ID NO: 1086 - DNA, 19 bp, Artificial
  Sequences of functional target portions for RNAi to inhibit influenza virus.
aaatgataacacagagaac

SEQ ID NO: 1087 - DNA, 19 bp, Artificial
  Sequences of functional target portions for RNAi to inhibit influenza virus.
atgataacacagagaacaa

SEQ ID NO: 1088 - DNA, 19 bp, Artificial
  Sequences of functional target portions for RNAi to inhibit influenza virus.
gataacacagagaacaata

SEQ ID NO: 1089 - DNA, 19 bp, Artificial
  Sequences of functional target portions for RNAi to inhibit influenza virus.
acacagagaacaataggta

SEQ ID NO: 1090 - DNA, 19 bp, Artificial
  Sequences of functional target portions for RNAi to inhibit influenza virus.
cacagagaacaataggtaa

SEQ ID NO: 1091 - DNA, 19 bp, Artificial
  Sequences of functional target portions for RNAi to inhibit influenza virus.
acagagaacaataggtaaa

SEQ ID NO: 1092 - DNA, 19 bp, Artificial
  Sequences of functional target portions for RNAi to inhibit influenza virus.
gaacaataggtaaaaagaa

SEQ ID NO: 1093 - DNA, 19 bp, Artificial
  Sequences of functional target portions for RNAi to inhibit influenza virus.
ggtaaaaagaagcagagat

SEQ ID NO: 1094 - DNA, 19 bp, Artificial
  Sequences of functional target portions for RNAi to inhibit influenza virus.
gtaaaaagaagcagagatt

SEQ ID NO: 1095 - DNA, 19 bp, Artificial
  Sequences of functional target portions for RNAi to inhibit influenza virus.
aaaaagaagcagagattga

SEQ ID NO: 1096 - DNA, 19 bp, Artificial
  Sequences of functional target portions for RNAi to inhibit influenza virus.
agaagcagagattgaacaa

SEQ ID NO: 1097 - DNA, 19 bp, Artificial
  Sequences of functional target portions for RNAi to inhibit influenza virus.
aagcagagattgaacaaaa

SEQ ID NO: 1098 - DNA, 19 bp, Artificial
  Sequences of functional target portions for RNAi to inhibit influenza virus.
agattgaacaaaaggagtt

SEQ ID NO: 1099 - DNA, 19 bp, Artificial
  Sequences of functional target portions for RNAi to inhibit influenza virus.
gaacaaaaggagttatcta

SEQ ID NO: 1100 - DNA, 19 bp, Artificial
  Sequences of functional target portions for RNAi to inhibit influenza virus.
caaaaggagttatctaatt

SEQ ID NO: 1101 - DNA, 19 bp, Artificial
  Sequences of functional target portions for RNAi to inhibit influenza virus.
aaaaggagttatctaatta

SEQ ID NO: 1102 - DNA, 19 bp, Artificial
  Sequences of functional target portions for RNAi to inhibit influenza virus.
agttatctaattagagcat

SEQ ID NO: 1103 - DNA, 19 bp, Artificial
  Sequences of functional target portions for RNAi to inhibit influenza virus.
ttatctaattagagcattg

SEQ ID NO: 1104 - DNA, 19 bp, Artificial
  Sequences of functional target portions for RNAi to inhibit influenza virus.
gagcattgaccctgaacac

SEQ ID NO: 1105 - DNA, 19 bp, Artificial
  Sequences of functional target portions for RNAi to inhibit influenza virus.
gcattgaccctgaacacaa

SEQ ID NO: 1106 - DNA, 19 bp, Artificial
  Sequences of functional target portions for RNAi to inhibit influenza virus.
ccctgaacacaatgaccaa

SEQ ID NO: 1107 - DNA, 19 bp, Artificial
  Sequences of functional target portions for RNAi to inhibit influenza virus.
gaccaaagatgctgagaga

SEQ ID NO: 1108 - DNA, 19 bp, Artificial
  Sequences of functional target portions for RNAi to inhibit influenza virus.
ccaaagatgctgagagagg

SEQ ID NO: 1109 - DNA, 19 bp, Artificial
  Sequences of functional target portions for RNAi to inhibit influenza virus.
aaagatgctgagagaggga

SEQ ID NO: 1110 - DNA, 19 bp, Artificial
  Sequences of functional target portions for RNAi to inhibit influenza virus.
gctgagagagggaagctaa

SEQ ID NO: 1111 - DNA, 19 bp, Artificial
  Sequences of functional target portions for RNAi to inhibit influenza virus.
ctgagagagggaagctaaa

SEQ ID NO: 1112 - DNA, 19 bp, Artificial
  Sequences of functional target portions for RNAi to inhibit influenza virus.
aagctaaaacggagagcaa

SEQ ID NO: 1113 - DNA, 19 bp, Artificial
  Sequences of functional target portions for RNAi to inhibit influenza virus.
gctaaaacggagagcaatt

SEQ ID NO: 1114 - DNA, 19 bp, Artificial
  Sequences of functional target portions for RNAi to inhibit influenza virus.
aaacggagagcaattgcaa

SEQ ID NO: 1115 - DNA, 19 bp, Artificial
  Sequences of functional target portions for RNAi to inhibit influenza virus.
caaataagggggtttgtat

SEQ ID NO: 1116 - DNA, 19 bp, Artificial
  Sequences of functional target portions for RNAi to inhibit influenza virus.
aaataagggggtttgtata

SEQ ID NO: 1117 - DNA, 19 bp, Artificial
  Sequences of functional target portions for RNAi to inhibit influenza virus.
tgtatactttgttgagaca

SEQ ID NO: 1118 - DNA, 19 bp, Artificial
  Sequences of functional target portions for RNAi to inhibit influenza virus.
gagacactggcaaggagta

SEQ ID NO: 1119 - DNA, 19 bp, Artificial
  Sequences of functional target portions for RNAi to inhibit influenza virus.
agacactggcaaggagtat

SEQ ID NO: 1120 - DNA, 19 bp, Artificial
  Sequences of functional target portions for RNAi to inhibit influenza virus.
acactggcaaggagtatat

SEQ ID NO: 1121 - DNA, 19 bp, Artificial
  Sequences of functional target portions for RNAi to inhibit influenza virus.
tggcaaggagtatatgtga

SEQ ID NO: 1122 - DNA, 19 bp, Artificial
  Sequences of functional target portions for RNAi to inhibit influenza virus.
gcaaggagtatatgtgaga

SEQ ID NO: 1123 - DNA, 19 bp, Artificial
  Sequences of functional target portions for RNAi to inhibit influenza virus.
aaggagtatatgtgagaaa

SEQ ID NO: 1124 - DNA, 19 bp, Artificial
  Sequences of functional target portions for RNAi to inhibit influenza virus.
ggagtatatgtgagaaact

SEQ ID NO: 1125 - DNA, 19 bp, Artificial
  Sequences of functional target portions for RNAi to inhibit influenza virus.
gagtatatgtgagaaactt

SEQ ID NO: 1126 - DNA, 19 bp, Artificial
  Sequences of functional target portions for RNAi to inhibit influenza virus.
gtatatgtgagaaacttga

SEQ ID NO: 1127 - DNA, 19 bp, Artificial
  Sequences of functional target portions for RNAi to inhibit influenza virus.
atgtgagaaacttgaacaa

SEQ ID NO: 1128 - DNA, 19 bp, Artificial
  Sequences of functional target portions for RNAi to inhibit influenza virus.
gtgagaaacttgaacaatc

SEQ ID NO: 1129 - DNA, 19 bp, Artificial
  Sequences of functional target portions for RNAi to inhibit influenza virus.
tgagaaacttgaacaatca

SEQ ID NO: 1130 - DNA, 19 bp, Artificial
  Sequences of functional target portions for RNAi to inhibit influenza virus.
gttgccagttggaggcaat

SEQ ID NO: 1131 - DNA, 19 bp, Artificial
  Sequences of functional target portions for RNAi to inhibit influenza virus.
cagttggaggcaatgagaa

SEQ ID NO: 1132 - DNA, 19 bp, Artificial
  Sequences of functional target portions for RNAi to inhibit influenza virus.
agttggaggcaatgagaag

SEQ ID NO: 1133 - DNA, 19 bp, Artificial
  Sequences of functional target portions for RNAi to inhibit influenza virus.
ttggaggcaatgagaagaa

SEQ ID NO: 1134 - DNA, 19 bp, Artificial
  Sequences of functional target portions for RNAi to inhibit influenza virus.
ggcaatgagaagaaagcaa

SEQ ID NO: 1135 - DNA, 19 bp, Artificial
  Sequences of functional target portions for RNAi to inhibit influenza virus.
gcaatgagaagaaagcaaa

SEQ ID NO: 1136 - DNA, 19 bp, Artificial
  Sequences of functional target portions for RNAi to inhibit influenza virus.
aagaaagcaaagttggcaa

SEQ ID NO: 1137 - DNA, 19 bp, Artificial
  Sequences of functional target portions for RNAi to inhibit influenza virus.
agaaagcaaagttggcaaa

SEQ ID NO: 1138 - DNA, 19 bp, Artificial
  Sequences of functional target portions for RNAi to inhibit influenza virus.
aagcaaagttggcaaatgt

SEQ ID NO: 1139 - DNA, 19 bp, Artificial
  Sequences of functional target portions for RNAi to inhibit influenza virus.
tggcaaatgttgtaaggaa

SEQ ID NO: 1140 - DNA, 19 bp, Artificial
  Sequences of functional target portions for RNAi to inhibit influenza virus.
ggcaaatgttgtaaggaag

SEQ ID NO: 1141 - DNA, 19 bp, Artificial
  Sequences of functional target portions for RNAi to inhibit influenza virus.
gcaaatgttgtaaggaaga

SEQ ID NO: 1142 - DNA, 19 bp, Artificial
  Sequences of functional target portions for RNAi to inhibit influenza virus.
gttgtaaggaagatgatga

SEQ ID NO: 1143 - DNA, 19 bp, Artificial
  Sequences of functional target portions for RNAi to inhibit influenza virus.
gtaaggaagatgatgacca

SEQ ID NO: 1144 - DNA, 19 bp, Artificial
  Sequences of functional target portions for RNAi to inhibit influenza virus.
taaggaagatgatgaccaa

SEQ ID NO: 1145 - DNA, 19 bp, Artificial
  Sequences of functional target portions for RNAi to inhibit influenza virus.
aggaagatgatgaccaatt

SEQ ID NO: 1146 - DNA, 19 bp, Artificial
  Sequences of functional target portions for RNAi to inhibit influenza virus.
ggaagatgatgaccaattc

SEQ ID NO: 1147 - DNA, 19 bp, Artificial
  Sequences of functional target portions for RNAi to inhibit influenza virus.
gaactttctttcaccatca

SEQ ID NO: 1148 - DNA, 19 bp, Artificial
  Sequences of functional target portions for RNAi to inhibit influenza virus.
caccatcactggagataac

SEQ ID NO: 1149 - DNA, 19 bp, Artificial
  Sequences of functional target portions for RNAi to inhibit influenza virus.
ggagataacaccaaatgga

SEQ ID NO: 1150 - DNA, 19 bp, Artificial
  Sequences of functional target portions for RNAi to inhibit influenza virus.
gagataacaccaaatggaa

SEQ ID NO: 1151 - DNA, 19 bp, Artificial
  Sequences of functional target portions for RNAi to inhibit influenza virus.
agataacaccaaatggaac

SEQ ID NO: 1152 - DNA, 19 bp, Artificial
  Sequences of functional target portions for RNAi to inhibit influenza virus.
aacaccaaatggaacgaaa

SEQ ID NO: 1153 - DNA, 19 bp, Artificial
  Sequences of functional target portions for RNAi to inhibit influenza virus.
acaccaaatggaacgaaaa

SEQ ID NO: 1154 - DNA, 19 bp, Artificial
  Sequences of functional target portions for RNAi to inhibit influenza virus.
ccaaatggaacgaaaatca

SEQ ID NO: 1155 - DNA, 19 bp, Artificial
  Sequences of functional target portions for RNAi to inhibit influenza virus.
aatcagaatcctcggatgt

SEQ ID NO: 1156 - DNA, 19 bp, Artificial
  Sequences of functional target portions for RNAi to inhibit influenza virus.
atgatcacatatatgacaa

SEQ ID NO: 1157 - DNA, 19 bp, Artificial
  Sequences of functional target portions for RNAi to inhibit influenza virus.
tcacatatatgacaagaaa

SEQ ID NO: 1158 - DNA, 19 bp, Artificial
  Sequences of functional target portions for RNAi to inhibit influenza virus.
acatatatgacaagaaatc

SEQ ID NO: 1159 - DNA, 19 bp, Artificial
  Sequences of functional target portions for RNAi to inhibit influenza virus.
tgacaagaaatcagcccga

SEQ ID NO: 1160 - DNA, 19 bp, Artificial
  Sequences of functional target portions for RNAi to inhibit influenza virus.
acaagaaatcagcccgaat

SEQ ID NO: 1161 - DNA, 19 bp, Artificial
  Sequences of functional target portions for RNAi to inhibit influenza virus.
gaaatcagcccgaatggtt

SEQ ID NO: 1162 - DNA, 19 bp, Artificial
  Sequences of functional target portions for RNAi to inhibit influenza virus.
agcccgaatggttcagaaa

SEQ ID NO: 1163 - DNA, 19 bp, Artificial
  Sequences of functional target portions for RNAi to inhibit influenza virus.
cccgaatggttcagaaatg

SEQ ID NO: 1164 - DNA, 19 bp, Artificial
  Sequences of functional target portions for RNAi to inhibit influenza virus.
gttcagaaatgttctaagt

SEQ ID NO: 1165 - DNA, 19 bp, Artificial
  Sequences of functional target portions for RNAi to inhibit influenza virus.
tcagaaatgttctaagtat

SEQ ID NO: 1166 - DNA, 19 bp, Artificial
  Sequences of functional target portions for RNAi to inhibit influenza virus.
cagaaatgttctaagtatt

SEQ ID NO: 1167 - DNA, 19 bp, Artificial
  Sequences of functional target portions for RNAi to inhibit influenza virus.
tgttctaagtattgctcca

SEQ ID NO: 1168 - DNA, 19 bp, Artificial
  Sequences of functional target portions for RNAi to inhibit influenza virus.
tctaagtattgctccaata

SEQ ID NO: 1169 - DNA, 19 bp, Artificial
  Sequences of functional target portions for RNAi to inhibit influenza virus.
ctaagtattgctccaataa

SEQ ID NO: 1170 - DNA, 19 bp, Artificial
  Sequences of functional target portions for RNAi to inhibit influenza virus.
gctccaataatgttctcaa

SEQ ID NO: 1171 - DNA, 19 bp, Artificial
  Sequences of functional target portions for RNAi to inhibit influenza virus.
ctccaataatgttctcaaa

SEQ ID NO: 1172 - DNA, 19 bp, Artificial
  Sequences of functional target portions for RNAi to inhibit influenza virus.
ccaataatgttctcaaaca

SEQ ID NO: 1173 - DNA, 19 bp, Artificial
  Sequences of functional target portions for RNAi to inhibit influenza virus.
caataatgttctcaaacaa

SEQ ID NO: 1174 - DNA, 19 bp, Artificial
  Sequences of functional target portions for RNAi to inhibit influenza virus.
aataatgttctcaaacaaa

SEQ ID NO: 1175 - DNA, 19 bp, Artificial
  Sequences of functional target portions for RNAi to inhibit influenza virus.
caaacaaaatggcgagact

SEQ ID NO: 1176 - DNA, 19 bp, Artificial
  Sequences of functional target portions for RNAi to inhibit influenza virus.
aaatggcgagactgggaaa

SEQ ID NO: 1177 - DNA, 19 bp, Artificial
  Sequences of functional target portions for RNAi to inhibit influenza virus.
gagactgggaaaagggtat

SEQ ID NO: 1178 - DNA, 19 bp, Artificial
  Sequences of functional target portions for RNAi to inhibit influenza virus.
gggaaaagggtatatgttt

SEQ ID NO: 1179 - DNA, 19 bp, Artificial
  Sequences of functional target portions for RNAi to inhibit influenza virus.
ggaaaagggtatatgtttg

SEQ ID NO: 1180 - DNA, 19 bp, Artificial
  Sequences of functional target portions for RNAi to inhibit influenza virus.
gaaaagggtatatgtttga

SEQ ID NO: 1181 - DNA, 19 bp, Artificial
  Sequences of functional target portions for RNAi to inhibit influenza virus.
gggtatatgtttgagagca

SEQ ID NO: 1182 - DNA, 19 bp, Artificial
  Sequences of functional target portions for RNAi to inhibit influenza virus.
ggtatatgtttgagagcaa

SEQ ID NO: 1183 - DNA, 19 bp, Artificial
  Sequences of functional target portions for RNAi to inhibit influenza virus.
tgtttgagagcaagagtat

SEQ ID NO: 1184 - DNA, 19 bp, Artificial
  Sequences of functional target portions for RNAi to inhibit influenza virus.
tttgagagcaagagtatga

SEQ ID NO: 1185 - DNA, 19 bp, Artificial
  Sequences of functional target portions for RNAi to inhibit influenza virus.
tgagagcaagagtatgaaa

SEQ ID NO: 1186 - DNA, 19 bp, Artificial
  Sequences of functional target portions for RNAi to inhibit influenza virus.
agagcaagagtatgaaact

SEQ ID NO: 1187 - DNA, 19 bp, Artificial
  Sequences of functional target portions for RNAi to inhibit influenza virus.
gagcaagagtatgaaactt

SEQ ID NO: 1188 - DNA, 19 bp, Artificial
  Sequences of functional target portions for RNAi to inhibit influenza virus.
agcaagagtatgaaactta

SEQ ID NO: 1189 - DNA, 19 bp, Artificial
  Sequences of functional target portions for RNAi to inhibit influenza virus.
gagtatgaaacttagaact

SEQ ID NO: 1190 - DNA, 19 bp, Artificial
  Sequences of functional target portions for RNAi to inhibit influenza virus.
agtatgaaacttagaactc

SEQ ID NO: 1191 - DNA, 19 bp, Artificial
  Sequences of functional target portions for RNAi to inhibit influenza virus.
gtatgaaacttagaactca

SEQ ID NO: 1192 - DNA, 19 bp, Artificial
  Sequences of functional target portions for RNAi to inhibit influenza virus.
tatgaaacttagaactcaa

SEQ ID NO: 1193 - DNA, 19 bp, Artificial
  Sequences of functional target portions for RNAi to inhibit influenza virus.
gaaacttagaactcaaata

SEQ ID NO: 1194 - DNA, 19 bp, Artificial
  Sequences of functional target portions for RNAi to inhibit influenza virus.
acttagaactcaaatacct

SEQ ID NO: 1195 - DNA, 19 bp, Artificial
  Sequences of functional target portions for RNAi to inhibit influenza virus.
actcaaatacctgcagaaa

SEQ ID NO: 1196 - DNA, 19 bp, Artificial
  Sequences of functional target portions for RNAi to inhibit influenza virus.
ctcaaatacctgcagaaat

SEQ ID NO: 1197 - DNA, 19 bp, Artificial
  Sequences of functional target portions for RNAi to inhibit influenza virus.
tcaaatacctgcagaaatg

SEQ ID NO: 1198 - DNA, 19 bp, Artificial
  Sequences of functional target portions for RNAi to inhibit influenza virus.
ctgcagaaatgctagcaag

SEQ ID NO: 1199 - DNA, 19 bp, Artificial
  Sequences of functional target portions for RNAi to inhibit influenza virus.
cagaaatgctagcaagcat

SEQ ID NO: 1200 - DNA, 19 bp, Artificial
  Sequences of functional target portions for RNAi to inhibit influenza virus.
tagcaagcatcgatttgaa

SEQ ID NO: 1201 - DNA, 19 bp, Artificial
  Sequences of functional target portions for RNAi to inhibit influenza virus.
gcaagcatcgatttgaaat

SEQ ID NO: 1202 - DNA, 19 bp, Artificial
  Sequences of functional target portions for RNAi to inhibit influenza virus.
caagcatcgatttgaaata

SEQ ID NO: 1203 - DNA, 19 bp, Artificial
  Sequences of functional target portions for RNAi to inhibit influenza virus.
gcatcgatttgaaatattt

SEQ ID NO: 1204 - DNA, 19 bp, Artificial
  Sequences of functional target portions for RNAi to inhibit influenza virus.
atttgaaatatttcaatga

SEQ ID NO: 1205 - DNA, 19 bp, Artificial
  Sequences of functional target portions for RNAi to inhibit influenza virus.
ttgaaatatttcaatgatt

SEQ ID NO: 1206 - DNA, 19 bp, Artificial
  Sequences of functional target portions for RNAi to inhibit influenza virus.
tgaaatatttcaatgattc

SEQ ID NO: 1207 - DNA, 19 bp, Artificial
  Sequences of functional target portions for RNAi to inhibit influenza virus.
gaaatatttcaatgattca

SEQ ID NO: 1208 - DNA, 19 bp, Artificial
  Sequences of functional target portions for RNAi to inhibit influenza virus.
tttcaatgattcaacaaga

SEQ ID NO: 1209 - DNA, 19 bp, Artificial
  Sequences of functional target portions for RNAi to inhibit influenza virus.
ttcaatgattcaacaagaa

SEQ ID NO: 1210 - DNA, 19 bp, Artificial
  Sequences of functional target portions for RNAi to inhibit influenza virus.
tcaatgattcaacaagaaa

SEQ ID NO: 1211 - DNA, 19 bp, Artificial
  Sequences of functional target portions for RNAi to inhibit influenza virus.
aatgattcaacaagaaaga

SEQ ID NO: 1212 - DNA, 19 bp, Artificial
  Sequences of functional target portions for RNAi to inhibit influenza virus.
gattcaacaagaaagaaga

SEQ ID NO: 1213 - DNA, 19 bp, Artificial
  Sequences of functional target portions for RNAi to inhibit influenza virus.
tcaacaagaaagaagattg

SEQ ID NO: 1214 - DNA, 19 bp, Artificial
  Sequences of functional target portions for RNAi to inhibit influenza virus.
caacaagaaagaagattga

SEQ ID NO: 1215 - DNA, 19 bp, Artificial
  Sequences of functional target portions for RNAi to inhibit influenza virus.
acaagaaagaagattgaaa

SEQ ID NO: 1216 - DNA, 19 bp, Artificial
  Sequences of functional target portions for RNAi to inhibit influenza virus.
caagaaagaagattgaaaa

SEQ ID NO: 1217 - DNA, 19 bp, Artificial
  Sequences of functional target portions for RNAi to inhibit influenza virus.
aagaaagaagattgaaaaa

SEQ ID NO: 1218 - DNA, 19 bp, Artificial
  Sequences of functional target portions for RNAi to inhibit influenza virus.
agaaagaagattgaaaaaa

SEQ ID NO: 1219 - DNA, 19 bp, Artificial
  Sequences of functional target portions for RNAi to inhibit influenza virus.
gaaagaagattgaaaaaat

SEQ ID NO: 1220 - DNA, 19 bp, Artificial
  Sequences of functional target portions for RNAi to inhibit influenza virus.
catcattgagccctggaat

SEQ ID NO: 1221 - DNA, 19 bp, Artificial
  Sequences of functional target portions for RNAi to inhibit influenza virus.
tcattgagccctggaatga

SEQ ID NO: 1222 - DNA, 19 bp, Artificial
  Sequences of functional target portions for RNAi to inhibit influenza virus.
ctggaatgatgatgggcat

SEQ ID NO: 1223 - DNA, 19 bp, Artificial
  Sequences of functional target portions for RNAi to inhibit influenza virus.
tgatgatgggcatgttcaa

SEQ ID NO: 1224 - DNA, 19 bp, Artificial
  Sequences of functional target portions for RNAi to inhibit influenza virus.
atgatgggcatgttcaata

SEQ ID NO: 1225 - DNA, 19 bp, Artificial
  Sequences of functional target portions for RNAi to inhibit influenza virus.
tgatgggcatgttcaatat

SEQ ID NO: 1226 - DNA, 19 bp, Artificial
  Sequences of functional target portions for RNAi to inhibit influenza virus.
gggcatgttcaatatgtta

SEQ ID NO: 1227 - DNA, 19 bp, Artificial
  Sequences of functional target portions for RNAi to inhibit influenza virus.
ggcatgttcaatatgttaa

SEQ ID NO: 1228 - DNA, 19 bp, Artificial
  Sequences of functional target portions for RNAi to inhibit influenza virus.
tatgttaagcactgtatta

SEQ ID NO: 1229 - DNA, 19 bp, Artificial
  Sequences of functional target portions for RNAi to inhibit influenza virus.
catcctgaatcttggacaa

SEQ ID NO: 1230 - DNA, 19 bp, Artificial
  Sequences of functional target portions for RNAi to inhibit influenza virus.
gaatcttggacaaaagaga

SEQ ID NO: 1231 - DNA, 19 bp, Artificial
  Sequences of functional target portions for RNAi to inhibit influenza virus.
ggacaaaagagatacacca

SEQ ID NO: 1232 - DNA, 19 bp, Artificial
  Sequences of functional target portions for RNAi to inhibit influenza virus.
gacaaaagagatacaccaa

SEQ ID NO: 1233 - DNA, 19 bp, Artificial
  Sequences of functional target portions for RNAi to inhibit influenza virus.
caaaagagatacaccaaga

SEQ ID NO: 1234 - DNA, 19 bp, Artificial
  Sequences of functional target portions for RNAi to inhibit influenza virus.
aagagatacaccaagacta

SEQ ID NO: 1235 - DNA, 19 bp, Artificial
  Sequences of functional target portions for RNAi to inhibit influenza virus.
agagatacaccaagactac

SEQ ID NO: 1236 - DNA, 19 bp, Artificial
  Sequences of functional target portions for RNAi to inhibit influenza virus.
actacttactggtgggatg

SEQ ID NO: 1237 - DNA, 19 bp, Artificial
  Sequences of functional target portions for RNAi to inhibit influenza virus.
cttcaatcctctgacgatt

SEQ ID NO: 1238 - DNA, 19 bp, Artificial
  Sequences of functional target portions for RNAi to inhibit influenza virus.
gattgtgaatgcacccaat

SEQ ID NO: 1239 - DNA, 19 bp, Artificial
  Sequences of functional target portions for RNAi to inhibit influenza virus.
acccaatcatgaagggatt

SEQ ID NO: 1240 - DNA, 19 bp, Artificial
  Sequences of functional target portions for RNAi to inhibit influenza virus.
aagccggagtcgacaggtt

SEQ ID NO: 1241 - DNA, 19 bp, Artificial
  Sequences of functional target portions for RNAi to inhibit influenza virus.
ttatcgaacctgtaagcta

SEQ ID NO: 1242 - DNA, 19 bp, Artificial
  Sequences of functional target portions for RNAi to inhibit influenza virus.
cctgtaagctacttggaat

SEQ ID NO: 1243 - DNA, 19 bp, Artificial
  Sequences of functional target portions for RNAi to inhibit influenza virus.
ctgtaagctacttggaatc

SEQ ID NO: 1244 - DNA, 19 bp, Artificial
  Sequences of functional target portions for RNAi to inhibit influenza virus.
ttggaatcaatatgagcaa

SEQ ID NO: 1245 - DNA, 19 bp, Artificial
  Sequences of functional target portions for RNAi to inhibit influenza virus.
ggaatcaatatgagcaaga

SEQ ID NO: 1246 - DNA, 19 bp, Artificial
  Sequences of functional target portions for RNAi to inhibit influenza virus.
gaatcaatatgagcaagaa

SEQ ID NO: 1247 - DNA, 19 bp, Artificial
  Sequences of functional target portions for RNAi to inhibit influenza virus.
aatcaatatgagcaagaaa

SEQ ID NO: 1248 - DNA, 19 bp, Artificial
  Sequences of functional target portions for RNAi to inhibit influenza virus.
atcaatatgagcaagaaaa

SEQ ID NO: 1249 - DNA, 19 bp, Artificial
  Sequences of functional target portions for RNAi to inhibit influenza virus.
tcaatatgagcaagaaaaa

SEQ ID NO: 1250 - DNA, 19 bp, Artificial
  Sequences of functional target portions for RNAi to inhibit influenza virus.
caagaaaaagtcttacata

SEQ ID NO: 1251 - DNA, 19 bp, Artificial
  Sequences of functional target portions for RNAi to inhibit influenza virus.
aagaaaaagtcttacataa

SEQ ID NO: 1252 - DNA, 19 bp, Artificial
  Sequences of functional target portions for RNAi to inhibit influenza virus.
agaaaaagtcttacataaa

SEQ ID NO: 1253 - DNA, 19 bp, Artificial
  Sequences of functional target portions for RNAi to inhibit influenza virus.
agtcttacataaacagaac

SEQ ID NO: 1254 - DNA, 19 bp, Artificial
  Sequences of functional target portions for RNAi to inhibit influenza virus.
tacataaacagaacaggta

SEQ ID NO: 1255 - DNA, 19 bp, Artificial
  Sequences of functional target portions for RNAi to inhibit influenza virus.
cataaacagaacaggtaca

SEQ ID NO: 1256 - DNA, 19 bp, Artificial
  Sequences of functional target portions for RNAi to inhibit influenza virus.
aaacagaacaggtacattt

SEQ ID NO: 1257 - DNA, 19 bp, Artificial
  Sequences of functional target portions for RNAi to inhibit influenza virus.
cagaacaggtacatttgaa

SEQ ID NO: 1258 - DNA, 19 bp, Artificial
  Sequences of functional target portions for RNAi to inhibit influenza virus.
agaacaggtacatttgaat

SEQ ID NO: 1259 - DNA, 19 bp, Artificial
  Sequences of functional target portions for RNAi to inhibit influenza virus.
gaacaggtacatttgaatt

SEQ ID NO: 1260 - DNA, 19 bp, Artificial
  Sequences of functional target portions for RNAi to inhibit influenza virus.
acatttgaattcacaagtt

SEQ ID NO: 1261 - DNA, 19 bp, Artificial
  Sequences of functional target portions for RNAi to inhibit influenza virus.
catttgaattcacaagttt

SEQ ID NO: 1262 - DNA, 19 bp, Artificial
  Sequences of functional target portions for RNAi to inhibit influenza virus.
tttctatcgttatgggttt

SEQ ID NO: 1263 - DNA, 19 bp, Artificial
  Sequences of functional target portions for RNAi to inhibit influenza virus.
gttatgggtttgttgccaa

SEQ ID NO: 1264 - DNA, 19 bp, Artificial
  Sequences of functional target portions for RNAi to inhibit influenza virus.
gcatggagctccccagttt

SEQ ID NO: 1265 - DNA, 19 bp, Artificial
  Sequences of functional target portions for RNAi to inhibit influenza virus.
tcaacgagtcagcggacat

SEQ ID NO: 1266 - DNA, 19 bp, Artificial
  Sequences of functional target portions for RNAi to inhibit influenza virus.
agtcagcggacatgagtat

SEQ ID NO: 1267 - DNA, 19 bp, Artificial
  Sequences of functional target portions for RNAi to inhibit influenza virus.
ggacatgagtattggagtt

SEQ ID NO: 1268 - DNA, 19 bp, Artificial
  Sequences of functional target portions for RNAi to inhibit influenza virus.
gacatgagtattggagtta

SEQ ID NO: 1269 - DNA, 19 bp, Artificial
  Sequences of functional target portions for RNAi to inhibit influenza virus.
catgagtattggagttact

SEQ ID NO: 1270 - DNA, 19 bp, Artificial
  Sequences of functional target portions for RNAi to inhibit influenza virus.
tggagttactgtcatcaaa

SEQ ID NO: 1271 - DNA, 19 bp, Artificial
  Sequences of functional target portions for RNAi to inhibit influenza virus.
gagttactgtcatcaaaaa

SEQ ID NO: 1272 - DNA, 19 bp, Artificial
  Sequences of functional target portions for RNAi to inhibit influenza virus.
catcaaaaacaatatgata

SEQ ID NO: 1273 - DNA, 19 bp, Artificial
  Sequences of functional target portions for RNAi to inhibit influenza virus.
atcaaaaacaatatgataa

SEQ ID NO: 1274 - DNA, 19 bp, Artificial
  Sequences of functional target portions for RNAi to inhibit influenza virus.
tcaaaaacaatatgataaa

SEQ ID NO: 1275 - DNA, 19 bp, Artificial
  Sequences of functional target portions for RNAi to inhibit influenza virus.
aaaaacaatatgataaaca

SEQ ID NO: 1276 - DNA, 19 bp, Artificial
  Sequences of functional target portions for RNAi to inhibit influenza virus.
aaaacaatatgataaacaa

SEQ ID NO: 1277 - DNA, 19 bp, Artificial
  Sequences of functional target portions for RNAi to inhibit influenza virus.
aaacaatatgataaacaat

SEQ ID NO: 1278 - DNA, 19 bp, Artificial
  Sequences of functional target portions for RNAi to inhibit influenza virus.
acaatatgataaacaatga

SEQ ID NO: 1279 - DNA, 19 bp, Artificial
  Sequences of functional target portions for RNAi to inhibit influenza virus.
tatgataaacaatgatctt

SEQ ID NO: 1280 - DNA, 19 bp, Artificial
  Sequences of functional target portions for RNAi to inhibit influenza virus.
aaacaatgatcttggtcca

SEQ ID NO: 1281 - DNA, 19 bp, Artificial
  Sequences of functional target portions for RNAi to inhibit influenza virus.
tgatcttggtccagcaaca

SEQ ID NO: 1282 - DNA, 19 bp, Artificial
  Sequences of functional target portions for RNAi to inhibit influenza virus.
tcaaatggcccttcagttg

SEQ ID NO: 1283 - DNA, 19 bp, Artificial
  Sequences of functional target portions for RNAi to inhibit influenza virus.
cagttgttcatcaaagatt

SEQ ID NO: 1284 - DNA, 19 bp, Artificial
  Sequences of functional target portions for RNAi to inhibit influenza virus.
agttgttcatcaaagatta

SEQ ID NO: 1285 - DNA, 19 bp, Artificial
  Sequences of functional target portions for RNAi to inhibit influenza virus.
agttgttcatcaaagatta

SEQ ID NO: 1286 - DNA, 19 bp, Artificial
  Sequences of functional target portions for RNAi to inhibit influenza virus.
catcaaagattacaggtac

SEQ ID NO: 1287 - DNA, 19 bp, Artificial
  Sequences of functional target portions for RNAi to inhibit influenza virus.
atcaaagattacaggtaca

SEQ ID NO: 1288 - DNA, 19 bp, Artificial
  Sequences of functional target portions for RNAi to inhibit influenza virus.
atgccatagaggtgacaca

SEQ ID NO: 1289 - DNA, 19 bp, Artificial
  Sequences of functional target portions for RNAi to inhibit influenza virus.
ccatagaggtgacacacaa

SEQ ID NO: 1290 - DNA, 19 bp, Artificial
  Sequences of functional target portions for RNAi to inhibit influenza virus.
catagaggtgacacacaaa

SEQ ID NO: 1291 - DNA, 19 bp, Artificial
  Sequences of functional target portions for RNAi to inhibit influenza virus.
tagaggtgacacacaaata

SEQ ID NO: 1292 - DNA, 19 bp, Artificial
  Sequences of functional target portions for RNAi to inhibit influenza virus.
ggtgacacacaaatacaaa

SEQ ID NO: 1293 - DNA, 19 bp, Artificial
  Sequences of functional target portions for RNAi to inhibit influenza virus.
acacaaatacaaacccgaa

SEQ ID NO: 1294 - DNA, 19 bp, Artificial
  Sequences of functional target portions for RNAi to inhibit influenza virus.
acaaatacaaacccgaaga

SEQ ID NO: 1295 - DNA, 19 bp, Artificial
  Sequences of functional target portions for RNAi to inhibit influenza virus.
aatacaaacccgaagatca

SEQ ID NO: 1296 - DNA, 19 bp, Artificial
  Sequences of functional target portions for RNAi to inhibit influenza virus.
atacaaacccgaagatcat

SEQ ID NO: 1297 - DNA, 19 bp, Artificial
  Sequences of functional target portions for RNAi to inhibit influenza virus.
acccgaagatcatttgaaa

SEQ ID NO: 1298 - DNA, 19 bp, Artificial
  Sequences of functional target portions for RNAi to inhibit influenza virus.
cccgaagatcatttgaaat

SEQ ID NO: 1299 - DNA, 19 bp, Artificial
  Sequences of functional target portions for RNAi to inhibit influenza virus.
ccgaagatcatttgaaata

SEQ ID NO: 1300 - DNA, 19 bp, Artificial
  Sequences of functional target portions for RNAi to inhibit influenza virus.
cgaagatcatttgaaataa

SEQ ID NO: 1301 - DNA, 19 bp, Artificial
  Sequences of functional target portions for RNAi to inhibit influenza virus.
gaagatcatttgaaataaa

SEQ ID NO: 1302 - DNA, 19 bp, Artificial
  Sequences of functional target portions for RNAi to inhibit influenza virus.
gatcatttgaaataaagaa

SEQ ID NO: 1303 - DNA, 19 bp, Artificial
  Sequences of functional target portions for RNAi to inhibit influenza virus.
atcatttgaaataaagaaa

SEQ ID NO: 1304 - DNA, 19 bp, Artificial
  Sequences of functional target portions for RNAi to inhibit influenza virus.
catttgaaataaagaaact

SEQ ID NO: 1305 - DNA, 19 bp, Artificial
  Sequences of functional target portions for RNAi to inhibit influenza virus.
aaataaagaaactgtggga

SEQ ID NO: 1306 - DNA, 19 bp, Artificial
  Sequences of functional target portions for RNAi to inhibit influenza virus.
ataaagaaactgtgggagc

SEQ ID NO: 1307 - DNA, 19 bp, Artificial
  Sequences of functional target portions for RNAi to inhibit influenza virus.
taaagaaactgtgggagca

SEQ ID NO: 1308 - DNA, 19 bp, Artificial
  Sequences of functional target portions for RNAi to inhibit influenza virus.
aaagaaactgtgggagcaa

SEQ ID NO: 1309 - DNA, 19 bp, Artificial
  Sequences of functional target portions for RNAi to inhibit influenza virus.
aagaaactgtgggagcaaa

SEQ ID NO: 1310 - DNA, 19 bp, Artificial
  Sequences of functional target portions for RNAi to inhibit influenza virus.
ggagcaaacccgttccaaa

SEQ ID NO: 1311 - DNA, 19 bp, Artificial
  Sequences of functional target portions for RNAi to inhibit influenza virus.
gagcaaacccgttccaaag

SEQ ID NO: 1312 - DNA, 19 bp, Artificial
  Sequences of functional target portions for RNAi to inhibit influenza virus.
cgacggaggcccaaattta

SEQ ID NO: 1313 - DNA, 19 bp, Artificial
  Sequences of functional target portions for RNAi to inhibit influenza virus.
ggcccaaatttatacaaca

SEQ ID NO: 1314 - DNA, 19 bp, Artificial
  Sequences of functional target portions for RNAi to inhibit influenza virus.
gcccaaatttatacaacat

SEQ ID NO: 1315 - DNA, 19 bp, Artificial
  Sequences of functional target portions for RNAi to inhibit influenza virus.
ccaaatttatacaacatta

SEQ ID NO: 1316 - DNA, 19 bp, Artificial
  Sequences of functional target portions for RNAi to inhibit influenza virus.
atttatacaacattagaaa

SEQ ID NO: 1317 - DNA, 19 bp, Artificial
  Sequences of functional target portions for RNAi to inhibit influenza virus.
ttatacaacattagaaatc

SEQ ID NO: 1318 - DNA, 19 bp, Artificial
  Sequences of functional target portions for RNAi to inhibit influenza virus.
cattagaaatctccacatt

SEQ ID NO: 1319 - DNA, 19 bp, Artificial
  Sequences of functional target portions for RNAi to inhibit influenza virus.
aatgggaattgatggatga

SEQ ID NO: 1320 - DNA, 19 bp, Artificial
  Sequences of functional target portions for RNAi to inhibit influenza virus.
gggaattgatggatgagga

SEQ ID NO: 1321 - DNA, 19 bp, Artificial
  Sequences of functional target portions for RNAi to inhibit influenza virus.
ggaattgatggatgaggat

SEQ ID NO: 1322 - DNA, 19 bp, Artificial
  Sequences of functional target portions for RNAi to inhibit influenza virus.
aattgatggatgaggatta

SEQ ID NO: 1323 - DNA, 19 bp, Artificial
  Sequences of functional target portions for RNAi to inhibit influenza virus.
ccactgaacccatttgtca

SEQ ID NO: 1324 - DNA, 19 bp, Artificial
  Sequences of functional target portions for RNAi to inhibit influenza virus.
tttgtcagccataaagaaa

SEQ ID NO: 1325 - DNA, 19 bp, Artificial
  Sequences of functional target portions for RNAi to inhibit influenza virus.
tgtcagccataaagaaatt

SEQ ID NO: 1326 - DNA, 19 bp, Artificial
  Sequences of functional target portions for RNAi to inhibit influenza virus.
agccataaagaaattgaat

SEQ ID NO: 1327 - DNA, 19 bp, Artificial
  Sequences of functional target portions for RNAi to inhibit influenza virus.
ccataaagaaattgaatca

SEQ ID NO: 1328 - DNA, 19 bp, Artificial
  Sequences of functional target portions for RNAi to inhibit influenza virus.
cataaagaaattgaatcaa

SEQ ID NO: 1329 - DNA, 19 bp, Artificial
  Sequences of functional target portions for RNAi to inhibit influenza virus.
ataaagaaattgaatcaat

SEQ ID NO: 1330 - DNA, 19 bp, Artificial
  Sequences of functional target portions for RNAi to inhibit influenza virus.
taaagaaattgaatcaatg

SEQ ID NO: 1331 - DNA, 19 bp, Artificial
  Sequences of functional target portions for RNAi to inhibit influenza virus.
aaagaaattgaatcaatga

SEQ ID NO: 1332 - DNA, 19 bp, Artificial
  Sequences of functional target portions for RNAi to inhibit influenza virus.
aagaaattgaatcaatgaa

SEQ ID NO: 1333 - DNA, 19 bp, Artificial
  Sequences of functional target portions for RNAi to inhibit influenza virus.
agaaattgaatcaatgaac

SEQ ID NO: 1334 - DNA, 19 bp, Artificial
  Sequences of functional target portions for RNAi to inhibit influenza virus.
gaaattgaatcaatgaaca

SEQ ID NO: 1335 - DNA, 19 bp, Artificial
  Sequences of functional target portions for RNAi to inhibit influenza virus.
aaattgaatcaatgaacaa

SEQ ID NO: 1336 - DNA, 19 bp, Artificial
  Sequences of functional target portions for RNAi to inhibit influenza virus.
tgaacaatgcagtgatgat

SEQ ID NO: 1337 - DNA, 19 bp, Artificial
  Sequences of functional target portions for RNAi to inhibit influenza virus.
agcacatggtccagccaaa

SEQ ID NO: 1338 - DNA, 19 bp, Artificial
  Sequences of functional target portions for RNAi to inhibit influenza virus.
cagccaaaaacatggagta

SEQ ID NO: 1339 - DNA, 19 bp, Artificial
  Sequences of functional target portions for RNAi to inhibit influenza virus.
ccaaaaacatggagtatga

SEQ ID NO: 1340 - DNA, 19 bp, Artificial
  Sequences of functional target portions for RNAi to inhibit influenza virus.
ggagtatgatgctgttgca

SEQ ID NO: 1341 - DNA, 19 bp, Artificial
  Sequences of functional target portions for RNAi to inhibit influenza virus.
gtatgatgctgttgcaaca

SEQ ID NO: 1342 - DNA, 19 bp, Artificial
  Sequences of functional target portions for RNAi to inhibit influenza virus.
caaaagaaatcgatccatc

SEQ ID NO: 1343 - DNA, 19 bp, Artificial
  Sequences of functional target portions for RNAi to inhibit influenza virus.
agaaatcgatccatcttga

SEQ ID NO: 1344 - DNA, 19 bp, Artificial
  Sequences of functional target portions for RNAi to inhibit influenza virus.
aatcgatccatcttgaata

SEQ ID NO: 1345 - DNA, 19 bp, Artificial
  Sequences of functional target portions for RNAi to inhibit influenza virus.
cgatccatcttgaatacaa

SEQ ID NO: 1346 - DNA, 19 bp, Artificial
  Sequences of functional target portions for RNAi to inhibit influenza virus.
catcttgaatacaagtcaa

SEQ ID NO: 1347 - DNA, 19 bp, Artificial
  Sequences of functional target portions for RNAi to inhibit influenza virus.
cttgaatacaagtcaaaga

SEQ ID NO: 1348 - DNA, 19 bp, Artificial
  Sequences of functional target portions for RNAi to inhibit influenza virus.
gaatacaagtcaaagagga

SEQ ID NO: 1349 - DNA, 19 bp, Artificial
  Sequences of functional target portions for RNAi to inhibit influenza virus.
tacaagtcaaagaggagta

SEQ ID NO: 1350 - DNA, 19 bp, Artificial
  Sequences of functional target portions for RNAi to inhibit influenza virus.
aagtcaaagaggagtactt

SEQ ID NO: 1351 - DNA, 19 bp, Artificial
  Sequences of functional target portions for RNAi to inhibit influenza virus.
tcaaagaggagtacttgaa

SEQ ID NO: 1352 - DNA, 19 bp, Artificial
  Sequences of functional target portions for RNAi to inhibit influenza virus.
aaagaggagtacttgaaga

SEQ ID NO: 1353 - DNA, 19 bp, Artificial
  Sequences of functional target portions for RNAi to inhibit influenza virus.
aagaggagtacttgaagat

SEQ ID NO: 1354 - DNA, 19 bp, Artificial
  Sequences of functional target portions for RNAi to inhibit influenza virus.
gaggagtacttgaagatga

SEQ ID NO: 1355 - DNA, 19 bp, Artificial
  Sequences of functional target portions for RNAi to inhibit influenza virus.
aggagtacttgaagatgaa

SEQ ID NO: 1356 - DNA, 19 bp, Artificial
  Sequences of functional target portions for RNAi to inhibit influenza virus.
gagtacttgaagatgaaca

SEQ ID NO: 1357 - DNA, 19 bp, Artificial
  Sequences of functional target portions for RNAi to inhibit influenza virus.
agtacttgaagatgaacaa

SEQ ID NO: 1358 - DNA, 19 bp, Artificial
  Sequences of functional target portions for RNAi to inhibit influenza virus.
acttgaagatgaacaaatg

SEQ ID NO: 1359 - DNA, 19 bp, Artificial
  Sequences of functional target portions for RNAi to inhibit influenza virus.
ttgaagatgaacaaatgta

SEQ ID NO: 1360 - DNA, 19 bp, Artificial
  Sequences of functional target portions for RNAi to inhibit influenza virus.
aagatgaacaaatgtacca

SEQ ID NO: 1361 - DNA, 19 bp, Artificial
  Sequences of functional target portions for RNAi to inhibit influenza virus.
gatgaacaaatgtaccaaa

SEQ ID NO: 1362 - DNA, 19 bp, Artificial
  Sequences of functional target portions for RNAi to inhibit influenza virus.
gaacaaatgtaccaaaggt

SEQ ID NO: 1363 - DNA, 19 bp, Artificial
  Sequences of functional target portions for RNAi to inhibit influenza virus.
gtaccaaaggtgctgcaat

SEQ ID NO: 1364 - DNA, 19 bp, Artificial
  Sequences of functional target portions for RNAi to inhibit influenza virus.
taccaaaggtgctgcaatt

SEQ ID NO: 1365 - DNA, 19 bp, Artificial
  Sequences of functional target portions for RNAi to inhibit influenza virus.
ccaaaggtgctgcaattta

SEQ ID NO: 1366 - DNA, 19 bp, Artificial
  Sequences of functional target portions for RNAi to inhibit influenza virus.
caaaggtgctgcaatttat

SEQ ID NO: 1367 - DNA, 19 bp, Artificial
  Sequences of functional target portions for RNAi to inhibit influenza virus.
gctgcaatttatttgaaaa

SEQ ID NO: 1368 - DNA, 19 bp, Artificial
  Sequences of functional target portions for RNAi to inhibit influenza virus.
ctgcaatttatttgaaaaa

SEQ ID NO: 1369 - DNA, 19 bp, Artificial
  Sequences of functional target portions for RNAi to inhibit influenza virus.
gcaatttatttgaaaaatt

SEQ ID NO: 1370 - DNA, 19 bp, Artificial
  Sequences of functional target portions for RNAi to inhibit influenza virus.
cagcagttcatacagaaga

SEQ ID NO: 1371 - DNA, 19 bp, Artificial
  Sequences of functional target portions for RNAi to inhibit influenza virus.
acagaagaccagtcgggat

SEQ ID NO: 1372 - DNA, 19 bp, Artificial
  Sequences of functional target portions for RNAi to inhibit influenza virus.
cagaagaccagtcgggata

SEQ ID NO: 1373 - DNA, 19 bp, Artificial
  Sequences of functional target portions for RNAi to inhibit influenza virus.
cagtcgggatatccagtat

SEQ ID NO: 1374 - DNA, 19 bp, Artificial
  Sequences of functional target portions for RNAi to inhibit influenza virus.
ccagtatggtggaggctat

SEQ ID NO: 1375 - DNA, 19 bp, Artificial
  Sequences of functional target portions for RNAi to inhibit influenza virus.
ccgaattgatgcacggatt

SEQ ID NO: 1376 - DNA, 19 bp, Artificial
  Sequences of functional target portions for RNAi to inhibit influenza virus.
gcacggattgatttcgaat

SEQ ID NO: 1377 - DNA, 19 bp, Artificial
  Sequences of functional target portions for RNAi to inhibit influenza virus.
acggattgatttcgaatct

SEQ ID NO: 1378 - DNA, 19 bp, Artificial
  Sequences of functional target portions for RNAi to inhibit influenza virus.
tttcgaatctggaaggata

SEQ ID NO: 1379 - DNA, 19 bp, Artificial
  Sequences of functional target portions for RNAi to inhibit influenza virus.
gaatctggaaggataaaga

SEQ ID NO: 1380 - DNA, 19 bp, Artificial
  Sequences of functional target portions for RNAi to inhibit influenza virus.
atctggaaggataaagaaa

SEQ ID NO: 1381 - DNA, 19 bp, Artificial
  Sequences of functional target portions for RNAi to inhibit influenza virus.
ctggaaggataaagaaaga

SEQ ID NO: 1382 - DNA, 19 bp, Artificial
  Sequences of functional target portions for RNAi to inhibit influenza virus.
ggaaggataaagaaagaag

SEQ ID NO: 1383 - DNA, 19 bp, Artificial
  Sequences of functional target portions for RNAi to inhibit influenza virus.
gaaggataaagaaagaaga

SEQ ID NO: 1384 - DNA, 19 bp, Artificial
  Sequences of functional target portions for RNAi to inhibit influenza virus.
ggataaagaaagaagagtt

SEQ ID NO: 1385 - DNA, 19 bp, Artificial
  Sequences of functional target portions for RNAi to inhibit influenza virus.
gataaagaaagaagagttc

SEQ ID NO: 1386 - DNA, 19 bp, Artificial
  Sequences of functional target portions for RNAi to inhibit influenza virus.
agaaagaagagttcactga

SEQ ID NO: 1387 - DNA, 19 bp, Artificial
  Sequences of functional target portions for RNAi to inhibit influenza virus.
aaagaagagttcactgaga

SEQ ID NO: 1388 - DNA, 19 bp, Artificial
  Sequences of functional target portions for RNAi to inhibit influenza virus.
aagaagagttcactgagat

SEQ ID NO: 1389 - DNA, 19 bp, Artificial
  Sequences of functional target portions for RNAi to inhibit influenza virus.
aagagttcactgagatcat

SEQ ID NO: 1390 - DNA, 19 bp, Artificial
  Sequences of functional target portions for RNAi to inhibit influenza virus.
tcactgagatcatgaagat

SEQ ID NO: 1391 - DNA, 19 bp, Artificial
  Sequences of functional target portions for RNAi to inhibit influenza virus.
atgaagatctgttccacca

SEQ ID NO: 1392 - DNA, 19 bp, Artificial
  Sequences of functional target portions for RNAi to inhibit influenza virus.
gatctgttccaccattgaa

SEQ ID NO: 1393 - DNA, 19 bp, Artificial
  Sequences of functional target portions for RNAi to inhibit influenza virus.
tgaagagctcagacggcaa

SEQ ID NO: 1394 - DNA, 19 bp, Artificial
  Sequences of functional target portions for RNAi to inhibit influenza virus.
gaagagctcagacggcaaa

SEQ ID NO: 1395 - DNA, 19 bp, Artificial
  Sequences of functional target portions for RNAi to inhibit influenza virus.
cggcaaaaatagtgaattt

SEQ ID NO: 1396 - DNA, 19 bp, Artificial
  Sequences of functional target portions for RNAi to inhibit influenza virus.
gaatttagcttgtccttca

SEQ ID NO: 1397 - DNA, 19 bp, Artificial
  Sequences of functional target portions for RNAi to inhibit influenza virus.
gcttgtccttcatgaaaaa

SEQ ID NO: 1398 - DNA, 19 bp, Artificial
  Sequences of functional target portions for RNAi to inhibit influenza virus.
gaaaaaatgccttgtttct

SEQ ID NO: 1399 - DNA, 19 bp, Artificial
  Sequences of functional target portions for RNAi to inhibit influenza virus.
gaaagcaggtactgatcca

SEQ ID NO: 1400 - DNA, 19 bp, Artificial
  Sequences of functional target portions for RNAi to inhibit influenza virus.
aagcaggtactgatccaaa

SEQ ID NO: 1401 - DNA, 19 bp, Artificial
  Sequences of functional target portions for RNAi to inhibit influenza virus.
gatccaaaatggaagattt

SEQ ID NO: 1402 - DNA, 19 bp, Artificial
  Sequences of functional target portions for RNAi to inhibit influenza virus.
tggaagattttgtgcgaca

SEQ ID NO: 1403 - DNA, 19 bp, Artificial
  Sequences of functional target portions for RNAi to inhibit influenza virus.
cgacaatgcttcaatccga

SEQ ID NO: 1404 - DNA, 19 bp, Artificial
  Sequences of functional target portions for RNAi to inhibit influenza virus.
gcttcaatccgatgattgt

SEQ ID NO: 1405 - DNA, 19 bp, Artificial
  Sequences of functional target portions for RNAi to inhibit influenza virus.
ttgtcgagcttgcggaaaa

SEQ ID NO: 1406 - DNA, 19 bp, Artificial
  Sequences of functional target portions for RNAi to inhibit influenza virus.
cggaaaaaacaatgaaaga

SEQ ID NO: 1407 - DNA, 19 bp, Artificial
  Sequences of functional target portions for RNAi to inhibit influenza virus.
gaaaaaacaatgaaagagt

SEQ ID NO: 1408 - DNA, 19 bp, Artificial
  Sequences of functional target portions for RNAi to inhibit influenza virus.
aaaaaacaatgaaagagta

SEQ ID NO: 1409 - DNA, 19 bp, Artificial
  Sequences of functional target portions for RNAi to inhibit influenza virus.
aaaaacaatgaaagagtat

SEQ ID NO: 1410 - DNA, 19 bp, Artificial
  Sequences of functional target portions for RNAi to inhibit influenza virus.
acctgaaaatcgaaacaaa

SEQ ID NO: 1411 - DNA, 19 bp, Artificial
  Sequences of functional target portions for RNAi to inhibit influenza virus.
ctgaaaatcgaaacaaaca

SEQ ID NO: 1412 - DNA, 19 bp, Artificial
  Sequences of functional target portions for RNAi to inhibit influenza virus.
gaaaatcgaaacaaacaaa

SEQ ID NO: 1413 - DNA, 19 bp, Artificial
  Sequences of functional target portions for RNAi to inhibit influenza virus.
aaatcgaaacaaacaaatt

SEQ ID NO: 1414 - DNA, 19 bp, Artificial
  Sequences of functional target portions for RNAi to inhibit influenza virus.
aatcgaaacaaacaaattt

SEQ ID NO: 1415 - DNA, 19 bp, Artificial
  Sequences of functional target portions for RNAi to inhibit influenza virus.
acaaacaaatttgcagcaa

SEQ ID NO: 1416 - DNA, 19 bp, Artificial
  Sequences of functional target portions for RNAi to inhibit influenza virus.
caaacaaatttgcagcaat

SEQ ID NO: 1417 - DNA, 19 bp, Artificial
  Sequences of functional target portions for RNAi to inhibit influenza virus.
aaacaaatttgcagcaata

SEQ ID NO: 1418 - DNA, 19 bp, Artificial
  Sequences of functional target portions for RNAi to inhibit influenza virus.
tggaagtatgcttcatgta

SEQ ID NO: 1419 - DNA, 19 bp, Artificial
  Sequences of functional target portions for RNAi to inhibit influenza virus.
ggaagtatgcttcatgtat

SEQ ID NO: 1420 - DNA, 19 bp, Artificial
  Sequences of functional target portions for RNAi to inhibit influenza virus.
gaagtatgcttcatgtatt

SEQ ID NO: 1421 - DNA, 19 bp, Artificial
  Sequences of functional target portions for RNAi to inhibit influenza virus.
gcttcatgtattcagattt

SEQ ID NO: 1422 - DNA, 19 bp, Artificial
  Sequences of functional target portions for RNAi to inhibit influenza virus.
cttcatgtattcagatttt

SEQ ID NO: 1423 - DNA, 19 bp, Artificial
  Sequences of functional target portions for RNAi to inhibit influenza virus.
tcacttcatcaatgagcaa

SEQ ID NO: 1424 - DNA, 19 bp, Artificial
  Sequences of functional target portions for RNAi to inhibit influenza virus.
caatgagcaaggcgagtca

SEQ ID NO: 1425 - DNA, 19 bp, Artificial
  Sequences of functional target portions for RNAi to inhibit influenza virus.
gagcaaggcgagtcaataa

SEQ ID NO: 1426 - DNA, 19 bp, Artificial
  Sequences of functional target portions for RNAi to inhibit influenza virus.
gcgagtcaataatcgtaga

SEQ ID NO: 1427 - DNA, 19 bp, Artificial
  Sequences of functional target portions for RNAi to inhibit influenza virus.
agtcaataatcgtagaact

SEQ ID NO: 1428 - DNA, 19 bp, Artificial
  Sequences of functional target portions for RNAi to inhibit influenza virus.
gtcaataatcgtagaactt

SEQ ID NO: 1429 - DNA, 19 bp, Artificial
  Sequences of functional target portions for RNAi to inhibit influenza virus.
aatcgtagaacttggtgat

SEQ ID NO: 1430 - DNA, 19 bp, Artificial
  Sequences of functional target portions for RNAi to inhibit influenza virus.
cgtagaacttggtgatcca

SEQ ID NO: 1431 - DNA, 19 bp, Artificial
  Sequences of functional target portions for RNAi to inhibit influenza virus.
agaacttggtgatccaaat

SEQ ID NO: 1432 - DNA, 19 bp, Artificial
  Sequences of functional target portions for RNAi to inhibit influenza virus.
ttgaagcacagatttgaaa

SEQ ID NO: 1433 - DNA, 19 bp, Artificial
  Sequences of functional target portions for RNAi to inhibit influenza virus.
gaagcacagatttgaaata

SEQ ID NO: 1434 - DNA, 19 bp, Artificial
  Sequences of functional target portions for RNAi to inhibit influenza virus.
aagcacagatttgaaataa

SEQ ID NO: 1435 - DNA, 19 bp, Artificial
  Sequences of functional target portions for RNAi to inhibit influenza virus.
agcacagatttgaaataat

SEQ ID NO: 1436 - DNA, 19 bp, Artificial
  Sequences of functional target portions for RNAi to inhibit influenza virus.
gcacagatttgaaataatc

SEQ ID NO: 1437 - DNA, 19 bp, Artificial
  Sequences of functional target portions for RNAi to inhibit influenza virus.
ttgaaataatcgagggaag

SEQ ID NO: 1438 - DNA, 19 bp, Artificial
  Sequences of functional target portions for RNAi to inhibit influenza virus.
tgaaataatcgagggaaga

SEQ ID NO: 1439 - DNA, 19 bp, Artificial
  Sequences of functional target portions for RNAi to inhibit influenza virus.
aaataatcgagggaagaga

SEQ ID NO: 1440 - DNA, 19 bp, Artificial
  Sequences of functional target portions for RNAi to inhibit influenza virus.
cgagggaagagatcgcaca

SEQ ID NO: 1441 - DNA, 19 bp, Artificial
  Sequences of functional target portions for RNAi to inhibit influenza virus.
gagggaagagatcgcacaa

SEQ ID NO: 1442 - DNA, 19 bp, Artificial
  Sequences of functional target portions for RNAi to inhibit influenza virus.
gagggaagagatcgcacaa

SEQ ID NO: 1443 - DNA, 19 bp, Artificial
  Sequences of functional target portions for RNAi to inhibit influenza virus.
gcacaatggcctggacagt

SEQ ID NO: 1444 - DNA, 19 bp, Artificial
  Sequences of functional target portions for RNAi to inhibit influenza virus.
tggcctggacagtagtaaa

SEQ ID NO: 1445 - DNA, 19 bp, Artificial
  Sequences of functional target portions for RNAi to inhibit influenza virus.
ggacagtagtaaacagtat

SEQ ID NO: 1446 - DNA, 19 bp, Artificial
  Sequences of functional target portions for RNAi to inhibit influenza virus.
tagtaaacagtatttgcaa

SEQ ID NO: 1447 - DNA, 19 bp, Artificial
  Sequences of functional target portions for RNAi to inhibit influenza virus.
gtaaacagtatttgcaaca

SEQ ID NO: 1448 - DNA, 19 bp, Artificial
  Sequences of functional target portions for RNAi to inhibit influenza virus.
cactacaggggctgagaaa

SEQ ID NO: 1449 - DNA, 19 bp, Artificial
  Sequences of functional target portions for RNAi to inhibit influenza virus.
gggctgagaaaccaaagtt

SEQ ID NO: 1450 - DNA, 19 bp, Artificial
  Sequences of functional target portions for RNAi to inhibit influenza virus.
ggctgagaaaccaaagttt

SEQ ID NO: 1451 - DNA, 19 bp, Artificial
  Sequences of functional target portions for RNAi to inhibit influenza virus.
gctgagaaaccaaagtttc

SEQ ID NO: 1452 - DNA, 19 bp, Artificial
  Sequences of functional target portions for RNAi to inhibit influenza virus.
ctgagaaaccaaagtttct

SEQ ID NO: 1453 - DNA, 19 bp, Artificial
  Sequences of functional target portions for RNAi to inhibit influenza virus.
aaccaaagtttctaccaga

SEQ ID NO: 1454 - DNA, 19 bp, Artificial
  Sequences of functional target portions for RNAi to inhibit influenza virus.
ccaaagtttctaccagatt

SEQ ID NO: 1455 - DNA, 19 bp, Artificial
  Sequences of functional target portions for RNAi to inhibit influenza virus.
caaagtttctaccagattt

SEQ ID NO: 1456 - DNA, 19 bp, Artificial
  Sequences of functional target portions for RNAi to inhibit influenza virus.
ctaccagatttgtatgatt

SEQ ID NO: 1457 - DNA, 19 bp, Artificial
  Sequences of functional target portions for RNAi to inhibit influenza virus.
taccagatttgtatgatta

SEQ ID NO: 1458 - DNA, 19 bp, Artificial
  Sequences of functional target portions for RNAi to inhibit influenza virus.
cagatttgtatgattacaa

SEQ ID NO: 1459 - DNA, 19 bp, Artificial
  Sequences of functional target portions for RNAi to inhibit influenza virus.
ttgtatgattacaaggaga

SEQ ID NO: 1460 - DNA, 19 bp, Artificial
  Sequences of functional target portions for RNAi to inhibit influenza virus.
tgtatgattacaaggagaa

SEQ ID NO: 1461 - DNA, 19 bp, Artificial
  Sequences of functional target portions for RNAi to inhibit influenza virus.
tatgattacaaggagaata

SEQ ID NO: 1462 - DNA, 19 bp, Artificial
  Sequences of functional target portions for RNAi to inhibit influenza virus.
atgattacaaggagaatag

SEQ ID NO: 1463 - DNA, 19 bp, Artificial
  Sequences of functional target portions for RNAi to inhibit influenza virus.
gattacaaggagaatagat

SEQ ID NO: 1464 - DNA, 19 bp, Artificial
  Sequences of functional target portions for RNAi to inhibit influenza virus.
attacaaggagaatagatt

SEQ ID NO: 1465 - DNA, 19 bp, Artificial
  Sequences of functional target portions for RNAi to inhibit influenza virus.
tacaaggagaatagattca

SEQ ID NO: 1466 - DNA, 19 bp, Artificial
  Sequences of functional target portions for RNAi to inhibit influenza virus.
ggagaatagattcatcgaa

SEQ ID NO: 1467 - DNA, 19 bp, Artificial
  Sequences of functional target portions for RNAi to inhibit influenza virus.
gagaatagattcatcgaaa

SEQ ID NO: 1468 - DNA, 19 bp, Artificial
  Sequences of functional target portions for RNAi to inhibit influenza virus.
agaatagattcatcgaaat

SEQ ID NO: 1469 - DNA, 19 bp, Artificial
  Sequences of functional target portions for RNAi to inhibit influenza virus.
gaatagattcatcgaaatt

SEQ ID NO: 1470 - DNA, 19 bp, Artificial
  Sequences of functional target portions for RNAi to inhibit influenza virus.
attcatcgaaattggagta

SEQ ID NO: 1471 - DNA, 19 bp, Artificial
  Sequences of functional target portions for RNAi to inhibit influenza virus.
catcgaaattggagtaaca

SEQ ID NO: 1472 - DNA, 19 bp, Artificial
  Sequences of functional target portions for RNAi to inhibit influenza virus.
aattggagtaacaaggaga

SEQ ID NO: 1473 - DNA, 19 bp, Artificial
  Sequences of functional target portions for RNAi to inhibit influenza virus.
tggagtaacaaggagagaa

SEQ ID NO: 1474 - DNA, 19 bp, Artificial
  Sequences of functional target portions for RNAi to inhibit influenza virus.
ggagtaacaaggagagaag

SEQ ID NO: 1475 - DNA, 19 bp, Artificial
  Sequences of functional target portions for RNAi to inhibit influenza virus.
agtaacaaggagagaagtt

SEQ ID NO: 1476 - DNA, 19 bp, Artificial
  Sequences of functional target portions for RNAi to inhibit influenza virus.
taacaaggagagaagttca

SEQ ID NO: 1477 - DNA, 19 bp, Artificial
  Sequences of functional target portions for RNAi to inhibit influenza virus.
aaggagagaagttcacata

SEQ ID NO: 1478 - DNA, 19 bp, Artificial
  Sequences of functional target portions for RNAi to inhibit influenza virus.
ggagagaagttcacatata

SEQ ID NO: 1479 - DNA, 19 bp, Artificial
  Sequences of functional target portions for RNAi to inhibit influenza virus.
gagagaagttcacatatac

SEQ ID NO: 1480 - DNA, 19 bp, Artificial
  Sequences of functional target portions for RNAi to inhibit influenza virus.
gagaagttcacatatacta

SEQ ID NO: 1481 - DNA, 19 bp, Artificial
  Sequences of functional target portions for RNAi to inhibit influenza virus.
tcacatatactatctggaa

SEQ ID NO: 1482 - DNA, 19 bp, Artificial
  Sequences of functional target portions for RNAi to inhibit influenza virus.
cacatatactatctggaaa

SEQ ID NO: 1483 - DNA, 19 bp, Artificial
  Sequences of functional target portions for RNAi to inhibit influenza virus.
acatatactatctggaaaa

SEQ ID NO: 1484 - DNA, 19 bp, Artificial
  Sequences of functional target portions for RNAi to inhibit influenza virus.
ctggaaaaggccaataaaa

SEQ ID NO: 1485 - DNA, 19 bp, Artificial
  Sequences of functional target portions for RNAi to inhibit influenza virus.
tggaaaaggccaataaaat

SEQ ID NO: 1486 - DNA, 19 bp, Artificial
  Sequences of functional target portions for RNAi to inhibit influenza virus.
ggaaaaggccaataaaatt

SEQ ID NO: 1487 - DNA, 19 bp, Artificial
  Sequences of functional target portions for RNAi to inhibit influenza virus.
gaaaaggccaataaaatta

SEQ ID NO: 1488 - DNA, 19 bp, Artificial
  Sequences of functional target portions for RNAi to inhibit influenza virus.
ccaataaaattaaatctga

SEQ ID NO: 1489 - DNA, 19 bp, Artificial
  Sequences of functional target portions for RNAi to inhibit influenza virus.
taaaattaaatctgagaaa

SEQ ID NO: 1490 - DNA, 19 bp, Artificial
  Sequences of functional target portions for RNAi to inhibit influenza virus.
aaaattaaatctgagaaaa

SEQ ID NO: 1491 - DNA, 19 bp, Artificial
  Sequences of functional target portions for RNAi to inhibit influenza virus.
aaattaaatctgagaaaac

SEQ ID NO: 1492 - DNA, 19 bp, Artificial
  Sequences of functional target portions for RNAi to inhibit influenza virus.
gggaagaaatggccacaaa

SEQ ID NO: 1493 - DNA, 19 bp, Artificial
  Sequences of functional target portions for RNAi to inhibit influenza virus.
agaaatggccacaaaggca

SEQ ID NO: 1494 - DNA, 19 bp, Artificial
  Sequences of functional target portions for RNAi to inhibit influenza virus.
ccacaaaggcagactacac

SEQ ID NO: 1495 - DNA, 19 bp, Artificial
  Sequences of functional target portions for RNAi to inhibit influenza virus.
cagactacactctcgatga

SEQ ID NO: 1496 - DNA, 19 bp, Artificial
  Sequences of functional target portions for RNAi to inhibit influenza virus.
agactacactctcgatgaa

SEQ ID NO: 1497 - DNA, 19 bp, Artificial
  Sequences of functional target portions for RNAi to inhibit influenza virus.
actacactctcgatgaaga

SEQ ID NO: 1498 - DNA, 19 bp, Artificial
  Sequences of functional target portions for RNAi to inhibit influenza virus.
ctacactctcgatgaagaa

SEQ ID NO: 1499 - DNA, 19 bp, Artificial
  Sequences of functional target portions for RNAi to inhibit influenza virus.
gatgaagaaagcagggcta

SEQ ID NO: 1500 - DNA, 19 bp, Artificial
  Sequences of functional target portions for RNAi to inhibit influenza virus.
gaaagcagggctaggatca

SEQ ID NO: 1501 - DNA, 19 bp, Artificial
  Sequences of functional target portions for RNAi to inhibit influenza virus.
aagcagggctaggatcaaa

SEQ ID NO: 1502 - DNA, 19 bp, Artificial
  Sequences of functional target portions for RNAi to inhibit influenza virus.
gatcaaaaccagactattc

SEQ ID NO: 1503 - DNA, 19 bp, Artificial
  Sequences of functional target portions for RNAi to inhibit influenza virus.
aaaccagactattcaccat

SEQ ID NO: 1504 - DNA, 19 bp, Artificial
  Sequences of functional target portions for RNAi to inhibit influenza virus.
actattcaccataagacaa

SEQ ID NO: 1505 - DNA, 19 bp, Artificial
  Sequences of functional target portions for RNAi to inhibit influenza virus.
tcaccataagacaagaaat

SEQ ID NO: 1506 - DNA, 19 bp, Artificial
  Sequences of functional target portions for RNAi to inhibit influenza virus.
caccataagacaagaaatg

SEQ ID NO: 1507 - DNA, 19 bp, Artificial
  Sequences of functional target portions for RNAi to inhibit influenza virus.
cagcagaggcctctgggat

SEQ ID NO: 1508 - DNA, 19 bp, Artificial
  Sequences of functional target portions for RNAi to inhibit influenza virus.
agcagaggcctctgggatt

SEQ ID NO: 1509 - DNA, 19 bp, Artificial
  Sequences of functional target portions for RNAi to inhibit influenza virus.
cgagagaggagaagagaca

SEQ ID NO: 1510 - DNA, 19 bp, Artificial
  Sequences of functional target portions for RNAi to inhibit influenza virus.
agagaggagaagagacaat

SEQ ID NO: 1511 - DNA, 19 bp, Artificial
  Sequences of functional target portions for RNAi to inhibit influenza virus.
gaggagaagagacaattga

SEQ ID NO: 1512 - DNA, 19 bp, Artificial
  Sequences of functional target portions for RNAi to inhibit influenza virus.
aggagaagagacaattgaa

SEQ ID NO: 1513 - DNA, 19 bp, Artificial
  Sequences of functional target portions for RNAi to inhibit influenza virus.
ggagaagagacaattgaag

SEQ ID NO: 1514 - DNA, 19 bp, Artificial
  Sequences of functional target portions for RNAi to inhibit influenza virus.
gagaagagacaattgaaga

SEQ ID NO: 1515 - DNA, 19 bp, Artificial
  Sequences of functional target portions for RNAi to inhibit influenza virus.
agaagagacaattgaagaa

SEQ ID NO: 1516 - DNA, 19 bp, Artificial
  Sequences of functional target portions for RNAi to inhibit influenza virus.
gaagagacaattgaagaaa

SEQ ID NO: 1517 - DNA, 19 bp, Artificial
  Sequences of functional target portions for RNAi to inhibit influenza virus.
agacaattgaagaaaggtt

SEQ ID NO: 1518 - DNA, 19 bp, Artificial
  Sequences of functional target portions for RNAi to inhibit influenza virus.
gacaattgaagaaaggttt

SEQ ID NO: 1519 - DNA, 19 bp, Artificial
  Sequences of functional target portions for RNAi to inhibit influenza virus.
attgaagaaaggtttgaaa

SEQ ID NO: 1520 - DNA, 19 bp, Artificial
  Sequences of functional target portions for RNAi to inhibit influenza virus.
ttgaagaaaggtttgaaat

SEQ ID NO: 1521 - DNA, 19 bp, Artificial
  Sequences of functional target portions for RNAi to inhibit influenza virus.
tgaagaaaggtttgaaatc

SEQ ID NO: 1522 - DNA, 19 bp, Artificial
  Sequences of functional target portions for RNAi to inhibit influenza virus.
gaagaaaggtttgaaatca

SEQ ID NO: 1523 - DNA, 19 bp, Artificial
  Sequences of functional target portions for RNAi to inhibit influenza virus.
aagaaaggtttgaaatcac

SEQ ID NO: 1524 - DNA, 19 bp, Artificial
  Sequences of functional target portions for RNAi to inhibit influenza virus.
agaaaggtttgaaatcaca

SEQ ID NO: 1525 - DNA, 19 bp, Artificial
  Sequences of functional target portions for RNAi to inhibit influenza virus.
aggtttgaaatcacaggaa

SEQ ID NO: 1526 - DNA, 19 bp, Artificial
  Sequences of functional target portions for RNAi to inhibit influenza virus.
ggtttgaaatcacaggaac

SEQ ID NO: 1527 - DNA, 19 bp, Artificial
  Sequences of functional target portions for RNAi to inhibit influenza virus.
gtttgaaatcacaggaaca

SEQ ID NO: 1528 - DNA, 19 bp, Artificial
  Sequences of functional target portions for RNAi to inhibit influenza virus.
tcacaggaacaatgcgcaa

SEQ ID NO: 1529 - DNA, 19 bp, Artificial
  Sequences of functional target portions for RNAi to inhibit influenza virus.
gcgcaagcttgccgaccaa

SEQ ID NO: 1530 - DNA, 19 bp, Artificial
  Sequences of functional target portions for RNAi to inhibit influenza virus.
gagcctatgtggatggatt

SEQ ID NO: 1531 - DNA, 19 bp, Artificial
  Sequences of functional target portions for RNAi to inhibit influenza virus.
ctatgtggatggattcgaa

SEQ ID NO: 1532 - DNA, 19 bp, Artificial
  Sequences of functional target portions for RNAi to inhibit influenza virus.
tggatggattcgaaccgaa

SEQ ID NO: 1533 - DNA, 19 bp, Artificial
  Sequences of functional target portions for RNAi to inhibit influenza virus.
gattcgaaccgaacggcta

SEQ ID NO: 1534 - DNA, 19 bp, Artificial
  Sequences of functional target portions for RNAi to inhibit influenza virus.
acggctacattgagggcaa

SEQ ID NO: 1535 - DNA, 19 bp, Artificial
  Sequences of functional target portions for RNAi to inhibit influenza virus.
gagggcaagctgtctcaaa

SEQ ID NO: 1536 - DNA, 19 bp, Artificial
  Sequences of functional target portions for RNAi to inhibit influenza virus.
agggcaagctgtctcaaat

SEQ ID NO: 1537 - DNA, 19 bp, Artificial
  Sequences of functional target portions for RNAi to inhibit influenza virus.
tctcaaatgtccaaagaag

SEQ ID NO: 1538 - DNA, 19 bp, Artificial
  Sequences of functional target portions for RNAi to inhibit influenza virus.
tcaaatgtccaaagaagta

SEQ ID NO: 1539 - DNA, 19 bp, Artificial
  Sequences of functional target portions for RNAi to inhibit influenza virus.
aaatgtccaaagaagtaaa

SEQ ID NO: 1540 - DNA, 19 bp, Artificial
  Sequences of functional target portions for RNAi to inhibit influenza virus.
ccaaagaagtaaatgctag

SEQ ID NO: 1541 - DNA, 19 bp, Artificial
  Sequences of functional target portions for RNAi to inhibit influenza virus.
caaagaagtaaatgctaga

SEQ ID NO: 1542 - DNA, 19 bp, Artificial
  Sequences of functional target portions for RNAi to inhibit influenza virus.
aagaagtaaatgctagaat

SEQ ID NO: 1543 - DNA, 19 bp, Artificial
  Sequences of functional target portions for RNAi to inhibit influenza virus.
agaagtaaatgctagaatt

SEQ ID NO: 1544 - DNA, 19 bp, Artificial
  Sequences of functional target portions for RNAi to inhibit influenza virus.
gaagtaaatgctagaattg

SEQ ID NO: 1545 - DNA, 19 bp, Artificial
  Sequences of functional target portions for RNAi to inhibit influenza virus.
agtaaatgctagaattgaa

SEQ ID NO: 1546 - DNA, 19 bp, Artificial
  Sequences of functional target portions for RNAi to inhibit influenza virus.
atgctagaattgaaccttt

SEQ ID NO: 1547 - DNA, 19 bp, Artificial
  Sequences of functional target portions for RNAi to inhibit influenza virus.
aattgaaccttttttgaaa

SEQ ID NO: 1548 - DNA, 19 bp, Artificial
  Sequences of functional target portions for RNAi to inhibit influenza virus.
ggtccaaattcctgctgat

SEQ ID NO: 1549 - DNA, 19 bp, Artificial
  Sequences of functional target portions for RNAi to inhibit influenza virus.
ccaaattcctgctgatgga

SEQ ID NO: 1550 - DNA, 19 bp, Artificial
  Sequences of functional target portions for RNAi to inhibit influenza virus.
gctgatggatgccttaaaa

SEQ ID NO: 1551 - DNA, 19 bp, Artificial
  Sequences of functional target portions for RNAi to inhibit influenza virus.
gatggatgccttaaaatta

SEQ ID NO: 1552 - DNA, 19 bp, Artificial
  Sequences of functional target portions for RNAi to inhibit influenza virus.
gcattgaggacccaagtca

SEQ ID NO: 1553 - DNA, 19 bp, Artificial
  Sequences of functional target portions for RNAi to inhibit influenza virus.
ggacccaagtcatgaagga

SEQ ID NO: 1554 - DNA, 19 bp, Artificial
  Sequences of functional target portions for RNAi to inhibit influenza virus.
acccaagtcatgaaggaga

SEQ ID NO: 1555 - DNA, 19 bp, Artificial
  Sequences of functional target portions for RNAi to inhibit influenza virus.
aagtcatgaaggagaggga

SEQ ID NO: 1556 - DNA, 19 bp, Artificial
  Sequences of functional target portions for RNAi to inhibit influenza virus.
gtcatgaaggagagggaat

SEQ ID NO: 1557 - DNA, 19 bp, Artificial
  Sequences of functional target portions for RNAi to inhibit influenza virus.
tcatgaaggagagggaata

SEQ ID NO: 1558 - DNA, 19 bp, Artificial
  Sequences of functional target portions for RNAi to inhibit influenza virus.
aggagagggaataccgcta

SEQ ID NO: 1559 - DNA, 19 bp, Artificial
  Sequences of functional target portions for RNAi to inhibit influenza virus.
gagagggaataccgctata

SEQ ID NO: 1560 - DNA, 19 bp, Artificial
  Sequences of functional target portions for RNAi to inhibit influenza virus.
agggaataccgctatatga

SEQ ID NO: 1561 - DNA, 19 bp, Artificial
  Sequences of functional target portions for RNAi to inhibit influenza virus.
gggaataccgctatatgat

SEQ ID NO: 1562 - DNA, 19 bp, Artificial
  Sequences of functional target portions for RNAi to inhibit influenza virus.
cgctatatgatgcaatcaa

SEQ ID NO: 1563 - DNA, 19 bp, Artificial
  Sequences of functional target portions for RNAi to inhibit influenza virus.
gctatatgatgcaatcaaa

SEQ ID NO: 1564 - DNA, 19 bp, Artificial
  Sequences of functional target portions for RNAi to inhibit influenza virus.
ctatatgatgcaatcaaat

SEQ ID NO: 1565 - DNA, 19 bp, Artificial
  Sequences of functional target portions for RNAi to inhibit influenza virus.
gatgcaatcaaatgcatga

SEQ ID NO: 1566 - DNA, 19 bp, Artificial
  Sequences of functional target portions for RNAi to inhibit influenza virus.
gcaatcaaatgcatgagaa

SEQ ID NO: 1567 - DNA, 19 bp, Artificial
  Sequences of functional target portions for RNAi to inhibit influenza virus.
caatcaaatgcatgagaac

SEQ ID NO: 1568 - DNA, 19 bp, Artificial
  Sequences of functional target portions for RNAi to inhibit influenza virus.
aatcaaatgcatgagaaca

SEQ ID NO: 1569 - DNA, 19 bp, Artificial
  Sequences of functional target portions for RNAi to inhibit influenza virus.
atcaaatgcatgagaacat

SEQ ID NO: 1570 - DNA, 19 bp, Artificial
  Sequences of functional target portions for RNAi to inhibit influenza virus.
gaacattctttggatggaa

SEQ ID NO: 1571 - DNA, 19 bp, Artificial
  Sequences of functional target portions for RNAi to inhibit influenza virus.
ggaaggaacccaatgttgt

SEQ ID NO: 1572 - DNA, 19 bp, Artificial
  Sequences of functional target portions for RNAi to inhibit influenza virus.
gaaggaacccaatgttgtt

SEQ ID NO: 1573 - DNA, 19 bp, Artificial
  Sequences of functional target portions for RNAi to inhibit influenza virus.
ggaacccaatgttgttaaa

SEQ ID NO: 1574 - DNA, 19 bp, Artificial
  Sequences of functional target portions for RNAi to inhibit influenza virus.
acccaatgttgttaaacca

SEQ ID NO: 1575 - DNA, 19 bp, Artificial
  Sequences of functional target portions for RNAi to inhibit influenza virus.
ccaatgttgttaaaccaca

SEQ ID NO: 1576 - DNA, 19 bp, Artificial
  Sequences of functional target portions for RNAi to inhibit influenza virus.
gttgttaaaccacacgaaa

SEQ ID NO: 1577 - DNA, 19 bp, Artificial
  Sequences of functional target portions for RNAi to inhibit influenza virus.
ttgttaaaccacacgaaaa

SEQ ID NO: 1578 - DNA, 19 bp, Artificial
  Sequences of functional target portions for RNAi to inhibit influenza virus.
ccacacgaaaagggaataa

SEQ ID NO: 1579 - DNA, 19 bp, Artificial
  Sequences of functional target portions for RNAi to inhibit influenza virus.
acacgaaaagggaataaat

SEQ ID NO: 1580 - DNA, 19 bp, Artificial
  Sequences of functional target portions for RNAi to inhibit influenza virus.
cgaaaagggaataaatcca

SEQ ID NO: 1581 - DNA, 19 bp, Artificial
  Sequences of functional target portions for RNAi to inhibit influenza virus.
gaaaagggaataaatccaa

SEQ ID NO: 1582 - DNA, 19 bp, Artificial
  Sequences of functional target portions for RNAi to inhibit influenza virus.
agggaataaatccaaatta

SEQ ID NO: 1583 - DNA, 19 bp, Artificial
  Sequences of functional target portions for RNAi to inhibit influenza virus.
gggaataaatccaaattat

SEQ ID NO: 1584 - DNA, 19 bp, Artificial
  Sequences of functional target portions for RNAi to inhibit influenza virus.
ggaataaatccaaattatc

SEQ ID NO: 1585 - DNA, 19 bp, Artificial
  Sequences of functional target portions for RNAi to inhibit influenza virus.
gaataaatccaaattatct

SEQ ID NO: 1586 - DNA, 19 bp, Artificial
  Sequences of functional target portions for RNAi to inhibit influenza virus.
ccaaattatcttctgtcat

SEQ ID NO: 1587 - DNA, 19 bp, Artificial
  Sequences of functional target portions for RNAi to inhibit influenza virus.
caaattatcttctgtcatg

SEQ ID NO: 1588 - DNA, 19 bp, Artificial
  Sequences of functional target portions for RNAi to inhibit influenza virus.
ggaagcaagtactggcaga

SEQ ID NO: 1589 - DNA, 19 bp, Artificial
  Sequences of functional target portions for RNAi to inhibit influenza virus.
gaagcaagtactggcagaa

SEQ ID NO: 1590 - DNA, 19 bp, Artificial
  Sequences of functional target portions for RNAi to inhibit influenza virus.
tggcagaactgcaggacat

SEQ ID NO: 1591 - DNA, 19 bp, Artificial
  Sequences of functional target portions for RNAi to inhibit influenza virus.
cagaactgcaggacattga

SEQ ID NO: 1592 - DNA, 19 bp, Artificial
  Sequences of functional target portions for RNAi to inhibit influenza virus.
actgcaggacattgagaat

SEQ ID NO: 1593 - DNA, 19 bp, Artificial
  Sequences of functional target portions for RNAi to inhibit influenza virus.
tgcaggacattgagaatga

SEQ ID NO: 1594 - DNA, 19 bp, Artificial
  Sequences of functional target portions for RNAi to inhibit influenza virus.
ggacattgagaatgaggag

SEQ ID NO: 1595 - DNA, 19 bp, Artificial
  Sequences of functional target portions for RNAi to inhibit influenza virus.
acattgagaatgaggagaa

SEQ ID NO: 1596 - DNA, 19 bp, Artificial
  Sequences of functional target portions for RNAi to inhibit influenza virus.
cattgagaatgaggagaaa

SEQ ID NO: 1597 - DNA, 19 bp, Artificial
  Sequences of functional target portions for RNAi to inhibit influenza virus.
ttgagaatgaggagaaaat

SEQ ID NO: 1598 - DNA, 19 bp, Artificial
  Sequences of functional target portions for RNAi to inhibit influenza virus.
ggagaaaattccaaagact

SEQ ID NO: 1599 - DNA, 19 bp, Artificial
  Sequences of functional target portions for RNAi to inhibit influenza virus.
gagaaaattccaaagacta

SEQ ID NO: 1600 - DNA, 19 bp, Artificial
  Sequences of functional target portions for RNAi to inhibit influenza virus.
agaaaattccaaagactaa

SEQ ID NO: 1601 - DNA, 19 bp, Artificial
  Sequences of functional target portions for RNAi to inhibit influenza virus.
attccaaagactaaaaata

SEQ ID NO: 1602 - DNA, 19 bp, Artificial
  Sequences of functional target portions for RNAi to inhibit influenza virus.
ccaaagactaaaaatatga

SEQ ID NO: 1603 - DNA, 19 bp, Artificial
  Sequences of functional target portions for RNAi to inhibit influenza virus.
agactaaaaatatgaagaa

SEQ ID NO: 1604 - DNA, 19 bp, Artificial
  Sequences of functional target portions for RNAi to inhibit influenza virus.
gactaaaaatatgaagaaa

SEQ ID NO: 1605 - DNA, 19 bp, Artificial
  Sequences of functional target portions for RNAi to inhibit influenza virus.
actaaaaatatgaagaaaa

SEQ ID NO: 1606 - DNA, 19 bp, Artificial
  Sequences of functional target portions for RNAi to inhibit influenza virus.
ctaaaaatatgaagaaaac

SEQ ID NO: 1607 - DNA, 19 bp, Artificial
  Sequences of functional target portions for RNAi to inhibit influenza virus.
aaaaatatgaagaaaacaa

SEQ ID NO: 1608 - DNA, 19 bp, Artificial
  Sequences of functional target portions for RNAi to inhibit influenza virus.
gaagaaaacaagtcagcta

SEQ ID NO: 1609 - DNA, 19 bp, Artificial
  Sequences of functional target portions for RNAi to inhibit influenza virus.
aagaaaacaagtcagctaa

SEQ ID NO: 1610 - DNA, 19 bp, Artificial
  Sequences of functional target portions for RNAi to inhibit influenza virus.
agaaaacaagtcagctaaa

SEQ ID NO: 1611 - DNA, 19 bp, Artificial
  Sequences of functional target portions for RNAi to inhibit influenza virus.
gggcacttggtgagaacat

SEQ ID NO: 1612 - DNA, 19 bp, Artificial
  Sequences of functional target portions for RNAi to inhibit influenza virus.
gtgagaacatggcaccaga

SEQ ID NO: 1613 - DNA, 19 bp, Artificial
  Sequences of functional target portions for RNAi to inhibit influenza virus.
gagaacatggcaccagaaa

SEQ ID NO: 1614 - DNA, 19 bp, Artificial
  Sequences of functional target portions for RNAi to inhibit influenza virus.
agaacatggcaccagaaaa

SEQ ID NO: 1615 - DNA, 19 bp, Artificial
  Sequences of functional target portions for RNAi to inhibit influenza virus.
gaacatggcaccagaaaag

SEQ ID NO: 1616 - DNA, 19 bp, Artificial
  Sequences of functional target portions for RNAi to inhibit influenza virus.
cagaaaaggtagactttga

SEQ ID NO: 1617 - DNA, 19 bp, Artificial
  Sequences of functional target portions for RNAi to inhibit influenza virus.
aggtagactttgacgactg

SEQ ID NO: 1618 - DNA, 19 bp, Artificial
  Sequences of functional target portions for RNAi to inhibit influenza virus.
tagactttgacgactgtaa

SEQ ID NO: 1619 - DNA, 19 bp, Artificial
  Sequences of functional target portions for RNAi to inhibit influenza virus.
agactttgacgactgtaaa

SEQ ID NO: 1620 - DNA, 19 bp, Artificial
  Sequences of functional target portions for RNAi to inhibit influenza virus.
tgacgactgtaaagatgta

SEQ ID NO: 1621 - DNA, 19 bp, Artificial
  Sequences of functional target portions for RNAi to inhibit influenza virus.
actgtaaagatgtaggtga

SEQ ID NO: 1622 - DNA, 19 bp, Artificial
  Sequences of functional target portions for RNAi to inhibit influenza virus.
ctgtaaagatgtaggtgat

SEQ ID NO: 1623 - DNA, 19 bp, Artificial
  Sequences of functional target portions for RNAi to inhibit influenza virus.
gtaaagatgtaggtgattt

SEQ ID NO: 1624 - DNA, 19 bp, Artificial
  Sequences of functional target portions for RNAi to inhibit influenza virus.
agatgtaggtgatttgaag

SEQ ID NO: 1625 - DNA, 19 bp, Artificial
  Sequences of functional target portions for RNAi to inhibit influenza virus.
gtaggtgatttgaagcaat

SEQ ID NO: 1626 - DNA, 19 bp, Artificial
  Sequences of functional target portions for RNAi to inhibit influenza virus.
taggtgatttgaagcaata

SEQ ID NO: 1627 - DNA, 19 bp, Artificial
  Sequences of functional target portions for RNAi to inhibit influenza virus.
gatttgaagcaatatgata

SEQ ID NO: 1628 - DNA, 19 bp, Artificial
  Sequences of functional target portions for RNAi to inhibit influenza virus.
tgaagcaatatgatagtga

SEQ ID NO: 1629 - DNA, 19 bp, Artificial
  Sequences of functional target portions for RNAi to inhibit influenza virus.
gaagcaatatgatagtgat

SEQ ID NO: 1630 - DNA, 19 bp, Artificial
  Sequences of functional target portions for RNAi to inhibit influenza virus.
gcaatatgatagtgatgaa

SEQ ID NO: 1631 - DNA, 19 bp, Artificial
  Sequences of functional target portions for RNAi to inhibit influenza virus.
atatgatagtgatgaacca

SEQ ID NO: 1632 - DNA, 19 bp, Artificial
  Sequences of functional target portions for RNAi to inhibit influenza virus.
tgatagtgatgaaccagaa

SEQ ID NO: 1633 - DNA, 19 bp, Artificial
  Sequences of functional target portions for RNAi to inhibit influenza virus.
gaattgaggtcgctagcaa

SEQ ID NO: 1634 - DNA, 19 bp, Artificial
  Sequences of functional target portions for RNAi to inhibit influenza virus.
ctagcaagttggattcaga

SEQ ID NO: 1635 - DNA, 19 bp, Artificial
  Sequences of functional target portions for RNAi to inhibit influenza virus.
caagttggattcagaatga

SEQ ID NO: 1636 - DNA, 19 bp, Artificial
  Sequences of functional target portions for RNAi to inhibit influenza virus.
ggattcagaatgagtttaa

SEQ ID NO: 1637 - DNA, 19 bp, Artificial
  Sequences of functional target portions for RNAi to inhibit influenza virus.
attcagaatgagtttaaca

SEQ ID NO: 1638 - DNA, 19 bp, Artificial
  Sequences of functional target portions for RNAi to inhibit influenza virus.
cagaatgagtttaacaagg

SEQ ID NO: 1639 - DNA, 19 bp, Artificial
  Sequences of functional target portions for RNAi to inhibit influenza virus.
aggcatgcgaactgacaga

SEQ ID NO: 1640 - DNA, 19 bp, Artificial
  Sequences of functional target portions for RNAi to inhibit influenza virus.
gcatgcgaactgacagatt

SEQ ID NO: 1641 - DNA, 19 bp, Artificial
  Sequences of functional target portions for RNAi to inhibit influenza virus.
ctgacagattcaagctgga

SEQ ID NO: 1642 - DNA, 19 bp, Artificial
  Sequences of functional target portions for RNAi to inhibit influenza virus.
gacagattcaagctggata

SEQ ID NO: 1643 - DNA, 19 bp, Artificial
  Sequences of functional target portions for RNAi to inhibit influenza virus.
gattcaagctggatagagc

SEQ ID NO: 1644 - DNA, 19 bp, Artificial
  Sequences of functional target portions for RNAi to inhibit influenza virus.
caagctggatagagctcga

SEQ ID NO: 1645 - DNA, 19 bp, Artificial
  Sequences of functional target portions for RNAi to inhibit influenza virus.
ggatagagctcgatgagat

SEQ ID NO: 1646 - DNA, 19 bp, Artificial
  Sequences of functional target portions for RNAi to inhibit influenza virus.
gatagagctcgatgagatt

SEQ ID NO: 1647 - DNA, 19 bp, Artificial
  Sequences of functional target portions for RNAi to inhibit influenza virus.
gctcgatgagattggagaa

SEQ ID NO: 1648 - DNA, 19 bp, Artificial
  Sequences of functional target portions for RNAi to inhibit influenza virus.
tcgatgagattggagaaga

SEQ ID NO: 1649 - DNA, 19 bp, Artificial
  Sequences of functional target portions for RNAi to inhibit influenza virus.
cgatgagattggagaagat

SEQ ID NO: 1650 - DNA, 19 bp, Artificial
  Sequences of functional target portions for RNAi to inhibit influenza virus.
gagaagatgtggctccaat

SEQ ID NO: 1651 - DNA, 19 bp, Artificial
  Sequences of functional target portions for RNAi to inhibit influenza virus.
agatgtggctccaattgaa

SEQ ID NO: 1652 - DNA, 19 bp, Artificial
  Sequences of functional target portions for RNAi to inhibit influenza virus.
ccaattgaacacattgcaa

SEQ ID NO: 1653 - DNA, 19 bp, Artificial
  Sequences of functional target portions for RNAi to inhibit influenza virus.
gaacacattgcaagcatga

SEQ ID NO: 1654 - DNA, 19 bp, Artificial
  Sequences of functional target portions for RNAi to inhibit influenza virus.
acacattgcaagcatgaga

SEQ ID NO: 1655 - DNA, 19 bp, Artificial
  Sequences of functional target portions for RNAi to inhibit influenza virus.
attgcaagcatgagaagga

SEQ ID NO: 1656 - DNA, 19 bp, Artificial
  Sequences of functional target portions for RNAi to inhibit influenza virus.
gcaagcatgagaaggaatt

SEQ ID NO: 1657 - DNA, 19 bp, Artificial
  Sequences of functional target portions for RNAi to inhibit influenza virus.
gcatgagaaggaattattt

SEQ ID NO: 1658 - DNA, 19 bp, Artificial
  Sequences of functional target portions for RNAi to inhibit influenza virus.
gagaaggaattatttcaca

SEQ ID NO: 1659 - DNA, 19 bp, Artificial
  Sequences of functional target portions for RNAi to inhibit influenza virus.
agaaggaattatttcacat

SEQ ID NO: 1660 - DNA, 19 bp, Artificial
  Sequences of functional target portions for RNAi to inhibit influenza virus.
ggaattatttcacatcaga

SEQ ID NO: 1661 - DNA, 19 bp, Artificial
  Sequences of functional target portions for RNAi to inhibit influenza virus.
tcacatcagaggtgtctca

SEQ ID NO: 1662 - DNA, 19 bp, Artificial
  Sequences of functional target portions for RNAi to inhibit influenza virus.
gtgtctcactgcagagcca

SEQ ID NO: 1663 - DNA, 19 bp, Artificial
  Sequences of functional target portions for RNAi to inhibit influenza virus.
actgcagagccacagaata

SEQ ID NO: 1664 - DNA, 19 bp, Artificial
  Sequences of functional target portions for RNAi to inhibit influenza virus.
ctgcagagccacagaatac

SEQ ID NO: 1665 - DNA, 19 bp, Artificial
  Sequences of functional target portions for RNAi to inhibit influenza virus.
gagccacagaatacataat

SEQ ID NO: 1666 - DNA, 19 bp, Artificial
  Sequences of functional target portions for RNAi to inhibit influenza virus.
gccacagaatacataatga

SEQ ID NO: 1667 - DNA, 19 bp, Artificial
  Sequences of functional target portions for RNAi to inhibit influenza virus.
ccacagaatacataatgaa

SEQ ID NO: 1668 - DNA, 19 bp, Artificial
  Sequences of functional target portions for RNAi to inhibit influenza virus.
tgaagggggtgtacatcaa

SEQ ID NO: 1669 - DNA, 19 bp, Artificial
  Sequences of functional target portions for RNAi to inhibit influenza virus.
catcaatactgccttgctt

SEQ ID NO: 1670 - DNA, 19 bp, Artificial
  Sequences of functional target portions for RNAi to inhibit influenza virus.
tcaatactgccttgcttaa

SEQ ID NO: 1671 - DNA, 19 bp, Artificial
  Sequences of functional target portions for RNAi to inhibit influenza virus.
gtgcagcaatggatgattt

SEQ ID NO: 1672 - DNA, 19 bp, Artificial
  Sequences of functional target portions for RNAi to inhibit influenza virus.
cagcaatggatgatttcca

SEQ ID NO: 1673 - DNA, 19 bp, Artificial
  Sequences of functional target portions for RNAi to inhibit influenza virus.
caatggatgatttccaatt

SEQ ID NO: 1674 - DNA, 19 bp, Artificial
  Sequences of functional target portions for RNAi to inhibit influenza virus.
aatggatgatttccaatta

SEQ ID NO: 1675 - DNA, 19 bp, Artificial
  Sequences of functional target portions for RNAi to inhibit influenza virus.
atggatgatttccaattaa

SEQ ID NO: 1676 - DNA, 19 bp, Artificial
  Sequences of functional target portions for RNAi to inhibit influenza virus.
tggatgatttccaattaat

SEQ ID NO: 1677 - DNA, 19 bp, Artificial
  Sequences of functional target portions for RNAi to inhibit influenza virus.
ggatgatttccaattaatt

SEQ ID NO: 1678 - DNA, 19 bp, Artificial
  Sequences of functional target portions for RNAi to inhibit influenza virus.
ccaattaattccaatgata

SEQ ID NO: 1679 - DNA, 19 bp, Artificial
  Sequences of functional target portions for RNAi to inhibit influenza virus.
caattaattccaatgataa

SEQ ID NO: 1680 - DNA, 19 bp, Artificial
  Sequences of functional target portions for RNAi to inhibit influenza virus.
ccaatgataagcaagtgta

SEQ ID NO: 1681 - DNA, 19 bp, Artificial
  Sequences of functional target portions for RNAi to inhibit influenza virus.
atgataagcaagtgtagaa

SEQ ID NO: 1682 - DNA, 19 bp, Artificial
  Sequences of functional target portions for RNAi to inhibit influenza virus.
ataagcaagtgtagaacta

SEQ ID NO: 1683 - DNA, 19 bp, Artificial
  Sequences of functional target portions for RNAi to inhibit influenza virus.
gtgtagaactaaggaggga

SEQ ID NO: 1684 - DNA, 19 bp, Artificial
  Sequences of functional target portions for RNAi to inhibit influenza virus.
gtagaactaaggagggaag

SEQ ID NO: 1685 - DNA, 19 bp, Artificial
  Sequences of functional target portions for RNAi to inhibit influenza virus.
actaaggagggaaggcgaa

SEQ ID NO: 1686 - DNA, 19 bp, Artificial
  Sequences of functional target portions for RNAi to inhibit influenza virus.
ctaaggagggaaggcgaaa

SEQ ID NO: 1687 - DNA, 19 bp, Artificial
  Sequences of functional target portions for RNAi to inhibit influenza virus.
aaggagggaaggcgaaaga

SEQ ID NO: 1688 - DNA, 19 bp, Artificial
  Sequences of functional target portions for RNAi to inhibit influenza virus.
gagggaaggcgaaagacca

SEQ ID NO: 1689 - DNA, 19 bp, Artificial
  Sequences of functional target portions for RNAi to inhibit influenza virus.
agggaaggcgaaagaccaa

SEQ ID NO: 1690 - DNA, 19 bp, Artificial
  Sequences of functional target portions for RNAi to inhibit influenza virus.
ggcgaaagaccaacttgta

SEQ ID NO: 1691 - DNA, 19 bp, Artificial
  Sequences of functional target portions for RNAi to inhibit influenza virus.
gcgaaagaccaacttgtat

SEQ ID NO: 1692 - DNA, 19 bp, Artificial
  Sequences of functional target portions for RNAi to inhibit influenza virus.
cgaaagaccaacttgtatg

SEQ ID NO: 1693 - DNA, 19 bp, Artificial
  Sequences of functional target portions for RNAi to inhibit influenza virus.
agaccaacttgtatggttt

SEQ ID NO: 1694 - DNA, 19 bp, Artificial
  Sequences of functional target portions for RNAi to inhibit influenza virus.
cttgtatggtttcatcata

SEQ ID NO: 1695 - DNA, 19 bp, Artificial
  Sequences of functional target portions for RNAi to inhibit influenza virus.
ttgtatggtttcatcataa

SEQ ID NO: 1696 - DNA, 19 bp, Artificial
  Sequences of functional target portions for RNAi to inhibit influenza virus.
tgtatggtttcatcataaa

SEQ ID NO: 1697 - DNA, 19 bp, Artificial
  Sequences of functional target portions for RNAi to inhibit influenza virus.
aaaggaagatcccacttaa

SEQ ID NO: 1698 - DNA, 19 bp, Artificial
  Sequences of functional target portions for RNAi to inhibit influenza virus.
ggaagatcccacttaagga

SEQ ID NO: 1699 - DNA, 19 bp, Artificial
  Sequences of functional target portions for RNAi to inhibit influenza virus.
gaagatcccacttaaggaa

SEQ ID NO: 1700 - DNA, 19 bp, Artificial
  Sequences of functional target portions for RNAi to inhibit influenza virus.
acttaaggaatgacaccga

SEQ ID NO: 1701 - DNA, 19 bp, Artificial
  Sequences of functional target portions for RNAi to inhibit influenza virus.
gaatgacaccgacgtggta

SEQ ID NO: 1702 - DNA, 19 bp, Artificial
  Sequences of functional target portions for RNAi to inhibit influenza virus.
atgacaccgacgtggtaaa

SEQ ID NO: 1703 - DNA, 19 bp, Artificial
  Sequences of functional target portions for RNAi to inhibit influenza virus.
acaccgacgtggtaaactt

SEQ ID NO: 1704 - DNA, 19 bp, Artificial
  Sequences of functional target portions for RNAi to inhibit influenza virus.
tggtaaactttgtgagcat

SEQ ID NO: 1705 - DNA, 19 bp, Artificial
  Sequences of functional target portions for RNAi to inhibit influenza virus.
tgacccaagacttgaacca

SEQ ID NO: 1706 - DNA, 19 bp, Artificial
  Sequences of functional target portions for RNAi to inhibit influenza virus.
acccaagacttgaaccaca

SEQ ID NO: 1707 - DNA, 19 bp, Artificial
  Sequences of functional target portions for RNAi to inhibit influenza virus.
cccaagacttgaaccacat

SEQ ID NO: 1708 - DNA, 19 bp, Artificial
  Sequences of functional target portions for RNAi to inhibit influenza virus.
aagacttgaaccacataaa

SEQ ID NO: 1709 - DNA, 19 bp, Artificial
  Sequences of functional target portions for RNAi to inhibit influenza virus.
gaaccacataaatgggaga

SEQ ID NO: 1710 - DNA, 19 bp, Artificial
  Sequences of functional target portions for RNAi to inhibit influenza virus.
ccacataaatgggagaagt

SEQ ID NO: 1711 - DNA, 19 bp, Artificial
  Sequences of functional target portions for RNAi to inhibit influenza virus.
cacataaatgggagaagta

SEQ ID NO: 1712 - DNA, 19 bp, Artificial
  Sequences of functional target portions for RNAi to inhibit influenza virus.
cataaatgggagaagtact

SEQ ID NO: 1713 - DNA, 19 bp, Artificial
  Sequences of functional target portions for RNAi to inhibit influenza virus.
tgggagaagtactgtgttc

SEQ ID NO: 1714 - DNA, 19 bp, Artificial
  Sequences of functional target portions for RNAi to inhibit influenza virus.
ggagaagtactgtgttctt

SEQ ID NO: 1715 - DNA, 19 bp, Artificial
  Sequences of functional target portions for RNAi to inhibit influenza virus.
gtactgtgttcttgagata

SEQ ID NO: 1716 - DNA, 19 bp, Artificial
  Sequences of functional target portions for RNAi to inhibit influenza virus.
gttcttgagataggagata

SEQ ID NO: 1717 - DNA, 19 bp, Artificial
  Sequences of functional target portions for RNAi to inhibit influenza virus.
tgagataggagatatgctt

SEQ ID NO: 1718 - DNA, 19 bp, Artificial
  Sequences of functional target portions for RNAi to inhibit influenza virus.
gagataggagatatgctta

SEQ ID NO: 1719 - DNA, 19 bp, Artificial
  Sequences of functional target portions for RNAi to inhibit influenza virus.
agataggagatatgcttat

SEQ ID NO: 1720 - DNA, 19 bp, Artificial
  Sequences of functional target portions for RNAi to inhibit influenza virus.
gataggagatatgcttata

SEQ ID NO: 1721 - DNA, 19 bp, Artificial
  Sequences of functional target portions for RNAi to inhibit influenza virus.
ggagatatgcttataagaa

SEQ ID NO: 1722 - DNA, 19 bp, Artificial
  Sequences of functional target portions for RNAi to inhibit influenza virus.
gagatatgcttataagaag

SEQ ID NO: 1723 - DNA, 19 bp, Artificial
  Sequences of functional target portions for RNAi to inhibit influenza virus.
agatatgcttataagaagt

SEQ ID NO: 1724 - DNA, 19 bp, Artificial
  Sequences of functional target portions for RNAi to inhibit influenza virus.
gcttataagaagtgccata

SEQ ID NO: 1725 - DNA, 19 bp, Artificial
  Sequences of functional target portions for RNAi to inhibit influenza virus.
ggccaggtttcaaggccca

SEQ ID NO: 1726 - DNA, 19 bp, Artificial
  Sequences of functional target portions for RNAi to inhibit influenza virus.
gagaacaaatggaacctca

SEQ ID NO: 1727 - DNA, 19 bp, Artificial
  Sequences of functional target portions for RNAi to inhibit influenza virus.
agaacaaatggaacctcaa

SEQ ID NO: 1728 - DNA, 19 bp, Artificial
  Sequences of functional target portions for RNAi to inhibit influenza virus.
gaacaaatggaacctcaaa

SEQ ID NO: 1729 - DNA, 19 bp, Artificial
  Sequences of functional target portions for RNAi to inhibit influenza virus.
acaaatggaacctcaaaaa

SEQ ID NO: 1730 - DNA, 19 bp, Artificial
  Sequences of functional target portions for RNAi to inhibit influenza virus.
aaatggaacctcaaaaatt

SEQ ID NO: 1731 - DNA, 19 bp, Artificial
  Sequences of functional target portions for RNAi to inhibit influenza virus.
aatggaacctcaaaaatta

SEQ ID NO: 1732 - DNA, 19 bp, Artificial
  Sequences of functional target portions for RNAi to inhibit influenza virus.
cctcaaaaattaaaatgaa

SEQ ID NO: 1733 - DNA, 19 bp, Artificial
  Sequences of functional target portions for RNAi to inhibit influenza virus.
ctcaaaaattaaaatgaaa

SEQ ID NO: 1734 - DNA, 19 bp, Artificial
  Sequences of functional target portions for RNAi to inhibit influenza virus.
tcaaaaattaaaatgaaat

SEQ ID NO: 1735 - DNA, 19 bp, Artificial
  Sequences of functional target portions for RNAi to inhibit influenza virus.
tgaaatggggaatggagat

SEQ ID NO: 1736 - DNA, 19 bp, Artificial
  Sequences of functional target portions for RNAi to inhibit influenza virus.
ggaatggagatgaggcgtt

SEQ ID NO: 1737 - DNA, 19 bp, Artificial
  Sequences of functional target portions for RNAi to inhibit influenza virus.
cctccagtcacttcaacaa

SEQ ID NO: 1738 - DNA, 19 bp, Artificial
  Sequences of functional target portions for RNAi to inhibit influenza virus.
ccagtcacttcaacaaatt

SEQ ID NO: 1739 - DNA, 19 bp, Artificial
  Sequences of functional target portions for RNAi to inhibit influenza virus.
acttcaacaaattgagagt

SEQ ID NO: 1740 - DNA, 19 bp, Artificial
  Sequences of functional target portions for RNAi to inhibit influenza virus.
ttcaacaaattgagagtat

SEQ ID NO: 1741 - DNA, 19 bp, Artificial
  Sequences of functional target portions for RNAi to inhibit influenza virus.
caacaaattgagagtatga

SEQ ID NO: 1742 - DNA, 19 bp, Artificial
  Sequences of functional target portions for RNAi to inhibit influenza virus.
acaaattgagagtatgatt

SEQ ID NO: 1743 - DNA, 19 bp, Artificial
  Sequences of functional target portions for RNAi to inhibit influenza virus.
aaattgagagtatgattga

SEQ ID NO: 1744 - DNA, 19 bp, Artificial
  Sequences of functional target portions for RNAi to inhibit influenza virus.
agagtatgattgaagctga

SEQ ID NO: 1745 - DNA, 19 bp, Artificial
  Sequences of functional target portions for RNAi to inhibit influenza virus.
gtcctctgtcaaagagaaa

SEQ ID NO: 1746 - DNA, 19 bp, Artificial
  Sequences of functional target portions for RNAi to inhibit influenza virus.
cctctgtcaaagagaaaga

SEQ ID NO: 1747 - DNA, 19 bp, Artificial
  Sequences of functional target portions for RNAi to inhibit influenza virus.
ctgtcaaagagaaagacat

SEQ ID NO: 1748 - DNA, 19 bp, Artificial
  Sequences of functional target portions for RNAi to inhibit influenza virus.
tgtcaaagagaaagacatg

SEQ ID NO: 1749 - DNA, 19 bp, Artificial
  Sequences of functional target portions for RNAi to inhibit influenza virus.
aagagaaagacatgaccaa

SEQ ID NO: 1750 - DNA, 19 bp, Artificial
  Sequences of functional target portions for RNAi to inhibit influenza virus.
agagaaagacatgaccaaa

SEQ ID NO: 1751 - DNA, 19 bp, Artificial
  Sequences of functional target portions for RNAi to inhibit influenza virus.
gagaaagacatgaccaaag

SEQ ID NO: 1752 - DNA, 19 bp, Artificial
  Sequences of functional target portions for RNAi to inhibit influenza virus.
agaaagacatgaccaaaga

SEQ ID NO: 1753 - DNA, 19 bp, Artificial
  Sequences of functional target portions for RNAi to inhibit influenza virus.
agacatgaccaaagagttc

SEQ ID NO: 1754 - DNA, 19 bp, Artificial
  Sequences of functional target portions for RNAi to inhibit influenza virus.
accaaagagttctttgaga

SEQ ID NO: 1755 - DNA, 19 bp, Artificial
  Sequences of functional target portions for RNAi to inhibit influenza virus.
ccaaagagttctttgagaa

SEQ ID NO: 1756 - DNA, 19 bp, Artificial
  Sequences of functional target portions for RNAi to inhibit influenza virus.
caaagagttctttgagaac

SEQ ID NO: 1757 - DNA, 19 bp, Artificial
  Sequences of functional target portions for RNAi to inhibit influenza virus.
aagagttctttgagaacaa

SEQ ID NO: 1758 - DNA, 19 bp, Artificial
  Sequences of functional target portions for RNAi to inhibit influenza virus.
tttgagaacaaatcagaaa

SEQ ID NO: 1759 - DNA, 19 bp, Artificial
  Sequences of functional target portions for RNAi to inhibit influenza virus.
tgagaacaaatcagaaaca

SEQ ID NO: 1760 - DNA, 19 bp, Artificial
  Sequences of functional target portions for RNAi to inhibit influenza virus.
gagaacaaatcagaaacat

SEQ ID NO: 1761 - DNA, 19 bp, Artificial
  Sequences of functional target portions for RNAi to inhibit influenza virus.
agaacaaatcagaaacatg

SEQ ID NO: 1762 - DNA, 19 bp, Artificial
  Sequences of functional target portions for RNAi to inhibit influenza virus.
aaacatggcccattggaga

SEQ ID NO: 1763 - DNA, 19 bp, Artificial
  Sequences of functional target portions for RNAi to inhibit influenza virus.
ccccaaaggagtggaggaa

SEQ ID NO: 1764 - DNA, 19 bp, Artificial
  Sequences of functional target portions for RNAi to inhibit influenza virus.
cccaaaggagtggaggaaa

SEQ ID NO: 1765 - DNA, 19 bp, Artificial
  Sequences of functional target portions for RNAi to inhibit influenza virus.
ccaaaggagtggaggaaag

SEQ ID NO: 1766 - DNA, 19 bp, Artificial
  Sequences of functional target portions for RNAi to inhibit influenza virus.
gaggaaagttccattggga

SEQ ID NO: 1767 - DNA, 19 bp, Artificial
  Sequences of functional target portions for RNAi to inhibit influenza virus.
aggaaagttccattgggaa

SEQ ID NO: 1768 - DNA, 19 bp, Artificial
  Sequences of functional target portions for RNAi to inhibit influenza virus.
ggaaagttccattgggaag

SEQ ID NO: 1769 - DNA, 19 bp, Artificial
  Sequences of functional target portions for RNAi to inhibit influenza virus.
gggaaggtctgcaggactt

SEQ ID NO: 1770 - DNA, 19 bp, Artificial
  Sequences of functional target portions for RNAi to inhibit influenza virus.
ctgcaggactttattagca

SEQ ID NO: 1771 - DNA, 19 bp, Artificial
  Sequences of functional target portions for RNAi to inhibit influenza virus.
tgcaggactttattagcaa

SEQ ID NO: 1772 - DNA, 19 bp, Artificial
  Sequences of functional target portions for RNAi to inhibit influenza virus.
gcaggactttattagcaaa

SEQ ID NO: 1773 - DNA, 19 bp, Artificial
  Sequences of functional target portions for RNAi to inhibit influenza virus.
tagcaaagtcggtattcaa

SEQ ID NO: 1774 - DNA, 19 bp, Artificial
  Sequences of functional target portions for RNAi to inhibit influenza virus.
gcaaagtcggtattcaaca

SEQ ID NO: 1775 - DNA, 19 bp, Artificial
  Sequences of functional target portions for RNAi to inhibit influenza virus.
agtcggtattcaacagctt

SEQ ID NO: 1776 - DNA, 19 bp, Artificial
  Sequences of functional target portions for RNAi to inhibit influenza virus.
gtatgcatctccacaacta

SEQ ID NO: 1777 - DNA, 19 bp, Artificial
  Sequences of functional target portions for RNAi to inhibit influenza virus.
ctccacaactagaaggatt

SEQ ID NO: 1778 - DNA, 19 bp, Artificial
  Sequences of functional target portions for RNAi to inhibit influenza virus.
tccacaactagaaggattt

SEQ ID NO: 1779 - DNA, 19 bp, Artificial
  Sequences of functional target portions for RNAi to inhibit influenza virus.
agaaggattttcagctgaa

SEQ ID NO: 1780 - DNA, 19 bp, Artificial
  Sequences of functional target portions for RNAi to inhibit influenza virus.
caagaaaactgcttcttat

SEQ ID NO: 1781 - DNA, 19 bp, Artificial
  Sequences of functional target portions for RNAi to inhibit influenza virus.
gttcaggctcttagggaca

SEQ ID NO: 1782 - DNA, 19 bp, Artificial
  Sequences of functional target portions for RNAi to inhibit influenza virus.
ggggctatatgaagcaatt

SEQ ID NO: 1783 - DNA, 19 bp, Artificial
  Sequences of functional target portions for RNAi to inhibit influenza virus.
ggctatatgaagcaattga

SEQ ID NO: 1784 - DNA, 19 bp, Artificial
  Sequences of functional target portions for RNAi to inhibit influenza virus.
gcaattgaggagtgcctga

SEQ ID NO: 1785 - DNA, 19 bp, Artificial
  Sequences of functional target portions for RNAi to inhibit influenza virus.
attgaggagtgcctgatta

SEQ ID NO: 1786 - DNA, 19 bp, Artificial
  Sequences of functional target portions for RNAi to inhibit influenza virus.
ttgaggagtgcctgattaa

SEQ ID NO: 1787 - DNA, 19 bp, Artificial
  Sequences of functional target portions for RNAi to inhibit influenza virus.
aggagtgcctgattaatga

SEQ ID NO: 1788 - DNA, 19 bp, Artificial
  Sequences of functional target portions for RNAi to inhibit influenza virus.
gattaatgatccctgggtt

SEQ ID NO: 1789 - DNA, 19 bp, Artificial
  Sequences of functional target portions for RNAi to inhibit influenza virus.
attaatgatccctgggttt

SEQ ID NO: 1790 - DNA, 19 bp, Artificial
  Sequences of functional target portions for RNAi to inhibit influenza virus.
gcttaatgcttcttggttc

SEQ ID NO: 1791 - DNA, 19 bp, Artificial
  Sequences of functional target portions for RNAi to inhibit influenza virus.
cttaatgcttcttggttca

SEQ ID NO: 1792 - DNA, 19 bp, Artificial
  Sequences of functional target portions for RNAi to inhibit influenza virus.
ttacacatgcattgagtta

SEQ ID NO: 1793 - DNA, 19 bp, Artificial
  Sequences of functional target portions for RNAi to inhibit influenza virus.
acacatgcattgagttagt

SEQ ID NO: 1794 - DNA, 19 bp, Artificial
  Sequences of functional target portions for RNAi to inhibit influenza virus.
ttgagttagttgtggcagt

SEQ ID NO: 1795 - DNA, 19 bp, Artificial
  Sequences of functional target portions for RNAi to inhibit influenza virus.
gttagttgtggcagtgcta

SEQ ID NO: 1796 - DNA, 19 bp, Artificial
  Sequences of functional target portions for RNAi to inhibit influenza virus.
ccaaaaaagtaccttgttt

SEQ ID NO: 1797 - DNA, 19 bp, Artificial
  Sequences of functional target portions for RNAi to inhibit influenza virus.
agcgaaagcaggtagatat

SEQ ID NO: 1798 - DNA, 19 bp, Artificial
  Sequences of functional target portions for RNAi to inhibit influenza virus.
gcgaaagcaggtagatatt

SEQ ID NO: 1799 - DNA, 19 bp, Artificial
  Sequences of functional target portions for RNAi to inhibit influenza virus.
gaaagcaggtagatattga

SEQ ID NO: 1800 - DNA, 19 bp, Artificial
  Sequences of functional target portions for RNAi to inhibit influenza virus.
aagcaggtagatattgaaa

SEQ ID NO: 1801 - DNA, 19 bp, Artificial
  Sequences of functional target portions for RNAi to inhibit influenza virus.
gcaggtagatattgaaaga

SEQ ID NO: 1802 - DNA, 19 bp, Artificial
  Sequences of functional target portions for RNAi to inhibit influenza virus.
aggtagatattgaaagatg

SEQ ID NO: 1803 - DNA, 19 bp, Artificial
  Sequences of functional target portions for RNAi to inhibit influenza virus.
ggtagatattgaaagatga

SEQ ID NO: 1804 - DNA, 19 bp, Artificial
  Sequences of functional target portions for RNAi to inhibit influenza virus.
gatattgaaagatgagtct

SEQ ID NO: 1805 - DNA, 19 bp, Artificial
  Sequences of functional target portions for RNAi to inhibit influenza virus.
tgaaagatgagtcttctaa

SEQ ID NO: 1806 - DNA, 19 bp, Artificial
  Sequences of functional target portions for RNAi to inhibit influenza virus.
taaccgaggtcgaaacgta

SEQ ID NO: 1807 - DNA, 19 bp, Artificial
  Sequences of functional target portions for RNAi to inhibit influenza virus.
ccgagatcgcacagagact

SEQ ID NO: 1808 - DNA, 19 bp, Artificial
  Sequences of functional target portions for RNAi to inhibit influenza virus.
cgcacagagacttgaagat

SEQ ID NO: 1809 - DNA, 19 bp, Artificial
  Sequences of functional target portions for RNAi to inhibit influenza virus.
gcacagagacttgaagatg

SEQ ID NO: 1810 - DNA, 19 bp, Artificial
  Sequences of functional target portions for RNAi to inhibit influenza virus.
cacagagacttgaagatgt

SEQ ID NO: 1811 - DNA, 19 bp, Artificial
  Sequences of functional target portions for RNAi to inhibit influenza virus.
gagacttgaagatgtcttt

SEQ ID NO: 1812 - DNA, 19 bp, Artificial
  Sequences of functional target portions for RNAi to inhibit influenza virus.
aagatgtctttgcagggaa

SEQ ID NO: 1813 - DNA, 19 bp, Artificial
  Sequences of functional target portions for RNAi to inhibit influenza virus.
agggaagaacactgatctt

SEQ ID NO: 1814 - DNA, 19 bp, Artificial
  Sequences of functional target portions for RNAi to inhibit influenza virus.
ggaagaacactgatcttga

SEQ ID NO: 1815 - DNA, 19 bp, Artificial
  Sequences of functional target portions for RNAi to inhibit influenza virus.
gaacactgatcttgaggtt

SEQ ID NO: 1816 - DNA, 19 bp, Artificial
  Sequences of functional target portions for RNAi to inhibit influenza virus.
acactgatcttgaggttct

SEQ ID NO: 1817 - DNA, 19 bp, Artificial
  Sequences of functional target portions for RNAi to inhibit influenza virus.
gttctcatggaatggctaa

SEQ ID NO: 1818 - DNA, 19 bp, Artificial
  Sequences of functional target portions for RNAi to inhibit influenza virus.
catggaatggctaaagaca

SEQ ID NO: 1819 - DNA, 19 bp, Artificial
  Sequences of functional target portions for RNAi to inhibit influenza virus.
atggaatggctaaagacaa

SEQ ID NO: 1820 - DNA, 19 bp, Artificial
  Sequences of functional target portions for RNAi to inhibit influenza virus.
tggaatggctaaagacaag

SEQ ID NO: 1821 - DNA, 19 bp, Artificial
  Sequences of functional target portions for RNAi to inhibit influenza virus.
tggctaaagacaagaccaa

SEQ ID NO: 1822 - DNA, 19 bp, Artificial
  Sequences of functional target portions for RNAi to inhibit influenza virus.
gctaaagacaagaccaatc

SEQ ID NO: 1823 - DNA, 19 bp, Artificial
  Sequences of functional target portions for RNAi to inhibit influenza virus.
ggatttgtgttcacgctca

SEQ ID NO: 1824 - DNA, 19 bp, Artificial
  Sequences of functional target portions for RNAi to inhibit influenza virus.
gagcgaggactgcagcgta

SEQ ID NO: 1825 - DNA, 19 bp, Artificial
  Sequences of functional target portions for RNAi to inhibit influenza virus.
gcgtagacgctttgtccaa

SEQ ID NO: 1826 - DNA, 19 bp, Artificial
  Sequences of functional target portions for RNAi to inhibit influenza virus.
gggaacggggatccaaata

SEQ ID NO: 1827 - DNA, 19 bp, Artificial
  Sequences of functional target portions for RNAi to inhibit influenza virus.
ggaacggggatccaaataa

SEQ ID NO: 1828 - DNA, 19 bp, Artificial
  Sequences of functional target portions for RNAi to inhibit influenza virus.
gatccaaataacatggaca

SEQ ID NO: 1829 - DNA, 19 bp, Artificial
  Sequences of functional target portions for RNAi to inhibit influenza virus.
atccaaataacatggacaa

SEQ ID NO: 1830 - DNA, 19 bp, Artificial
  Sequences of functional target portions for RNAi to inhibit influenza virus.
tccaaataacatggacaaa

SEQ ID NO: 1831 - DNA, 19 bp, Artificial
  Sequences of functional target portions for RNAi to inhibit influenza virus.
ccaaataacatggacaaag

SEQ ID NO: 1832 - DNA, 19 bp, Artificial
  Sequences of functional target portions for RNAi to inhibit influenza virus.
caaataacatggacaaagc

SEQ ID NO: 1833 - DNA, 19 bp, Artificial
  Sequences of functional target portions for RNAi to inhibit influenza virus.
taacatggacaaagcagtt

SEQ ID NO: 1834 - DNA, 19 bp, Artificial
  Sequences of functional target portions for RNAi to inhibit influenza virus.
acatggacaaagcagttaa

SEQ ID NO: 1835 - DNA, 19 bp, Artificial
  Sequences of functional target portions for RNAi to inhibit influenza virus.
catggacaaagcagttaaa

SEQ ID NO: 1836 - DNA, 19 bp, Artificial
  Sequences of functional target portions for RNAi to inhibit influenza virus.
tggacaaagcagttaaact

SEQ ID NO: 1837 - DNA, 19 bp, Artificial
  Sequences of functional target portions for RNAi to inhibit influenza virus.
ggacaaagcagttaaactg

SEQ ID NO: 1838 - DNA, 19 bp, Artificial
  Sequences of functional target portions for RNAi to inhibit influenza virus.
acaaagcagttaaactgta

SEQ ID NO: 1839 - DNA, 19 bp, Artificial
  Sequences of functional target portions for RNAi to inhibit influenza virus.
caaagcagttaaactgtat

SEQ ID NO: 1840 - DNA, 19 bp, Artificial
  Sequences of functional target portions for RNAi to inhibit influenza virus.
gcagttaaactgtatagga

SEQ ID NO: 1841 - DNA, 19 bp, Artificial
  Sequences of functional target portions for RNAi to inhibit influenza virus.
cagttaaactgtataggaa

SEQ ID NO: 1842 - DNA, 19 bp, Artificial
  Sequences of functional target portions for RNAi to inhibit influenza virus.
gttaaactgtataggaagc

SEQ ID NO: 1843 - DNA, 19 bp, Artificial
  Sequences of functional target portions for RNAi to inhibit influenza virus.
ctgtataggaagctcaaga

SEQ ID NO: 1844 - DNA, 19 bp, Artificial
  Sequences of functional target portions for RNAi to inhibit influenza virus.
ataggaagctcaagaggga

SEQ ID NO: 1845 - DNA, 19 bp, Artificial
  Sequences of functional target portions for RNAi to inhibit influenza virus.
aggaagctcaagagggaga

SEQ ID NO: 1846 - DNA, 19 bp, Artificial
  Sequences of functional target portions for RNAi to inhibit influenza virus.
ctcaagagggagataacat

SEQ ID NO: 1847 - DNA, 19 bp, Artificial
  Sequences of functional target portions for RNAi to inhibit influenza virus.
tcaagagggagataacatt

SEQ ID NO: 1848 - DNA, 19 bp, Artificial
  Sequences of functional target portions for RNAi to inhibit influenza virus.
aagaaatctcactcagtta

SEQ ID NO: 1849 - DNA, 19 bp, Artificial
  Sequences of functional target portions for RNAi to inhibit influenza virus.
gttgtatgggcctcatata

SEQ ID NO: 1850 - DNA, 19 bp, Artificial
  Sequences of functional target portions for RNAi to inhibit influenza virus.
gtatgggcctcatatacaa

SEQ ID NO: 1851 - DNA, 19 bp, Artificial
  Sequences of functional target portions for RNAi to inhibit influenza virus.
gcatcggtctcataggcaa

SEQ ID NO: 1852 - DNA, 19 bp, Artificial
  Sequences of functional target portions for RNAi to inhibit influenza virus.
catcggtctcataggcaaa

SEQ ID NO: 1853 - DNA, 19 bp, Artificial
  Sequences of functional target portions for RNAi to inhibit influenza virus.
tctcataggcaaatggtga

SEQ ID NO: 1854 - DNA, 19 bp, Artificial
  Sequences of functional target portions for RNAi to inhibit influenza virus.
aggcaaatggtgacaacaa

SEQ ID NO: 1855 - DNA, 19 bp, Artificial
  Sequences of functional target portions for RNAi to inhibit influenza virus.
gacaacaaccaatccacta

SEQ ID NO: 1856 - DNA, 19 bp, Artificial
  Sequences of functional target portions for RNAi to inhibit influenza virus.
acaacaaccaatccactaa

SEQ ID NO: 1857 - DNA, 19 bp, Artificial
  Sequences of functional target portions for RNAi to inhibit influenza virus.
ccactaatcagacatgaga

SEQ ID NO: 1858 - DNA, 19 bp, Artificial
  Sequences of functional target portions for RNAi to inhibit influenza virus.
actaatcagacatgagaac

SEQ ID NO: 1859 - DNA, 19 bp, Artificial
  Sequences of functional target portions for RNAi to inhibit influenza virus.
tcagacatgagaacagaat

SEQ ID NO: 1860 - DNA, 19 bp, Artificial
  Sequences of functional target portions for RNAi to inhibit influenza virus.
catgagaacagaatggttt

SEQ ID NO: 1861 - DNA, 19 bp, Artificial
  Sequences of functional target portions for RNAi to inhibit influenza virus.
gcactacagctaaggctat

SEQ ID NO: 1862 - DNA, 19 bp, Artificial
  Sequences of functional target portions for RNAi to inhibit influenza virus.
cagctaaggctatggagca

SEQ ID NO: 1863 - DNA, 19 bp, Artificial
  Sequences of functional target portions for RNAi to inhibit influenza virus.
cagctaaggctatggagca

SEQ ID NO: 1864 - DNA, 19 bp, Artificial
  Sequences of functional target portions for RNAi to inhibit influenza virus.
gctaaggctatggagcaaa

SEQ ID NO: 1865 - DNA, 19 bp, Artificial
  Sequences of functional target portions for RNAi to inhibit influenza virus.
ctaaggctatggagcaaat

SEQ ID NO: 1866 - DNA, 19 bp, Artificial
  Sequences of functional target portions for RNAi to inhibit influenza virus.
gagcaaatggctggatcga

SEQ ID NO: 1867 - DNA, 19 bp, Artificial
  Sequences of functional target portions for RNAi to inhibit influenza virus.
gcaaatggctggatcgagt

SEQ ID NO: 1868 - DNA, 19 bp, Artificial
  Sequences of functional target portions for RNAi to inhibit influenza virus.
ggctggatcgagtgagcaa

SEQ ID NO: 1869 - DNA, 19 bp, Artificial
  Sequences of functional target portions for RNAi to inhibit influenza virus.
cgagtgagcaagcagcaga

SEQ ID NO: 1870 - DNA, 19 bp, Artificial
  Sequences of functional target portions for RNAi to inhibit influenza virus.
cagcagaggccatggaggt

SEQ ID NO: 1871 - DNA, 19 bp, Artificial
  Sequences of functional target portions for RNAi to inhibit influenza virus.
ccatggaggttgctagtca

SEQ ID NO: 1872 - DNA, 19 bp, Artificial
  Sequences of functional target portions for RNAi to inhibit influenza virus.
gctagtcaggctagacaaa

SEQ ID NO: 1873 - DNA, 19 bp, Artificial
  Sequences of functional target portions for RNAi to inhibit influenza virus.
agacaaatggtgcaagcga

SEQ ID NO: 1874 - DNA, 19 bp, Artificial
  Sequences of functional target portions for RNAi to inhibit influenza virus.
gacaaatggtgcaagcgat

SEQ ID NO: 1875 - DNA, 19 bp, Artificial
  Sequences of functional target portions for RNAi to inhibit influenza virus.
acaaatggtgcaagcgatg

SEQ ID NO: 1876 - DNA, 19 bp, Artificial
  Sequences of functional target portions for RNAi to inhibit influenza virus.
gtgcaagcgatgagaacca

SEQ ID NO: 1877 - DNA, 19 bp, Artificial
  Sequences of functional target portions for RNAi to inhibit influenza virus.
gatgagaaccattgggact

SEQ ID NO: 1878 - DNA, 19 bp, Artificial
  Sequences of functional target portions for RNAi to inhibit influenza virus.
catcctagctccagtgctg

SEQ ID NO: 1879 - DNA, 19 bp, Artificial
  Sequences of functional target portions for RNAi to inhibit influenza virus.
ctccagtgctggtctgaaa

SEQ ID NO: 1880 - DNA, 19 bp, Artificial
  Sequences of functional target portions for RNAi to inhibit influenza virus.
gaaaaatgatcttcttgaa

SEQ ID NO: 1881 - DNA, 19 bp, Artificial
  Sequences of functional target portions for RNAi to inhibit influenza virus.
aaaaatgatcttcttgaaa

SEQ ID NO: 1882 - DNA, 19 bp, Artificial
  Sequences of functional target portions for RNAi to inhibit influenza virus.
aaaatgatcttcttgaaaa

SEQ ID NO: 1883 - DNA, 19 bp, Artificial
  Sequences of functional target portions for RNAi to inhibit influenza virus.
aaatgatcttcttgaaaat

SEQ ID NO: 1884 - DNA, 19 bp, Artificial
  Sequences of functional target portions for RNAi to inhibit influenza virus.
ttgaaaatttgcaggccta

SEQ ID NO: 1885 - DNA, 19 bp, Artificial
  Sequences of functional target portions for RNAi to inhibit influenza virus.
tttgcaggcctatcagaaa

SEQ ID NO: 1886 - DNA, 19 bp, Artificial
  Sequences of functional target portions for RNAi to inhibit influenza virus.
aggcctatcagaaacgaat

SEQ ID NO: 1887 - DNA, 19 bp, Artificial
  Sequences of functional target portions for RNAi to inhibit influenza virus.
gggtgcagatgcaacggtt

SEQ ID NO: 1888 - DNA, 19 bp, Artificial
  Sequences of functional target portions for RNAi to inhibit influenza virus.
gtgcagatgcaacggttca

SEQ ID NO: 1889 - DNA, 19 bp, Artificial
  Sequences of functional target portions for RNAi to inhibit influenza virus.
atgcaacggttcaagtgat

SEQ ID NO: 1890 - DNA, 19 bp, Artificial
  Sequences of functional target portions for RNAi to inhibit influenza virus.
ccgcaaatatcattgggat

SEQ ID NO: 1891 - DNA, 19 bp, Artificial
  Sequences of functional target portions for RNAi to inhibit influenza virus.
cgcaaatatcattgggatc

SEQ ID NO: 1892 - DNA, 19 bp, Artificial
  Sequences of functional target portions for RNAi to inhibit influenza virus.
gcaaatatcattgggatct

SEQ ID NO: 1893 - DNA, 19 bp, Artificial
  Sequences of functional target portions for RNAi to inhibit influenza virus.
caaatatcattgggatctt

SEQ ID NO: 1894 - DNA, 19 bp, Artificial
  Sequences of functional target portions for RNAi to inhibit influenza virus.
tcattgggatcttgcactt

SEQ ID NO: 1895 - DNA, 19 bp, Artificial
  Sequences of functional target portions for RNAi to inhibit influenza virus.
ggatcttgcacttgacatt

SEQ ID NO: 1896 - DNA, 19 bp, Artificial
  Sequences of functional target portions for RNAi to inhibit influenza virus.
gcacttgacattgtggatt

SEQ ID NO: 1897 - DNA, 19 bp, Artificial
  Sequences of functional target portions for RNAi to inhibit influenza virus.
ctttaaatacggactgaaa

SEQ ID NO: 1898 - DNA, 19 bp, Artificial
  Sequences of functional target portions for RNAi to inhibit influenza virus.
cggactgaaaggagggcct

SEQ ID NO: 1899 - DNA, 19 bp, Artificial
  Sequences of functional target portions for RNAi to inhibit influenza virus.
aggagggccttctacggaa

SEQ ID NO: 1900 - DNA, 19 bp, Artificial
  Sequences of functional target portions for RNAi to inhibit influenza virus.
ctacggaaggagtgccaaa

SEQ ID NO: 1901 - DNA, 19 bp, Artificial
  Sequences of functional target portions for RNAi to inhibit influenza virus.
ggaaggagtgccaaagtct

SEQ ID NO: 1902 - DNA, 19 bp, Artificial
  Sequences of functional target portions for RNAi to inhibit influenza virus.
gaaggagtgccaaagtcta

SEQ ID NO: 1903 - DNA, 19 bp, Artificial
  Sequences of functional target portions for RNAi to inhibit influenza virus.
aaggagtgccaaagtctat

SEQ ID NO: 1904 - DNA, 19 bp, Artificial
  Sequences of functional target portions for RNAi to inhibit influenza virus.
tgccaaagtctatgaggga

SEQ ID NO: 1905 - DNA, 19 bp, Artificial
  Sequences of functional target portions for RNAi to inhibit influenza virus.
gccaaagtctatgagggaa

SEQ ID NO: 1906 - DNA, 19 bp, Artificial
  Sequences of functional target portions for RNAi to inhibit influenza virus.
ccaaagtctatgagggaag

SEQ ID NO: 1907 - DNA, 19 bp, Artificial
  Sequences of functional target portions for RNAi to inhibit influenza virus.
agtctatgagggaagaata

SEQ ID NO: 1908 - DNA, 19 bp, Artificial
  Sequences of functional target portions for RNAi to inhibit influenza virus.
gtctatgagggaagaatat

SEQ ID NO: 1909 - DNA, 19 bp, Artificial
  Sequences of functional target portions for RNAi to inhibit influenza virus.
tgagggaagaatatcgaaa

SEQ ID NO: 1910 - DNA, 19 bp, Artificial
  Sequences of functional target portions for RNAi to inhibit influenza virus.
gggaagaatatcgaaagga

SEQ ID NO: 1911 - DNA, 19 bp, Artificial
  Sequences of functional target portions for RNAi to inhibit influenza virus.
ggaagaatatcgaaaggaa

SEQ ID NO: 1912 - DNA, 19 bp, Artificial
  Sequences of functional target portions for RNAi to inhibit influenza virus.
gaagaatatcgaaaggaac

SEQ ID NO: 1913 - DNA, 19 bp, Artificial
  Sequences of functional target portions for RNAi to inhibit influenza virus.
aagaatatcgaaaggaaca

SEQ ID NO: 1914 - DNA, 19 bp, Artificial
  Sequences of functional target portions for RNAi to inhibit influenza virus.
gaaaggaacagcagagtgc

SEQ ID NO: 1915 - DNA, 19 bp, Artificial
  Sequences of functional target portions for RNAi to inhibit influenza virus.
acagcagagtgctgtggat

SEQ ID NO: 1916 - DNA, 19 bp, Artificial
  Sequences of functional target portions for RNAi to inhibit influenza virus.
tcagcatagagctggagta

SEQ ID NO: 1917 - DNA, 19 bp, Artificial
  Sequences of functional target portions for RNAi to inhibit influenza virus.
cagcatagagctggagtaa

SEQ ID NO: 1918 - DNA, 19 bp, Artificial
  Sequences of functional target portions for RNAi to inhibit influenza virus.
gcatagagctggagtaaaa

SEQ ID NO: 1919 - DNA, 19 bp, Artificial
  Sequences of functional target portions for RNAi to inhibit influenza virus.
gagctggagtaaaaaacta

SEQ ID NO: 1920 - DNA, 19 bp, Artificial
  Sequences of functional target portions for RNAi to inhibit influenza virus.
gtaaaaaactaccttgttt

SEQ ID NO: 1921 - DNA, 19 bp, Artificial
  Sequences of functional target portions for RNAi to inhibit influenza virus.
ggtcgaaacgcctatcaga

SEQ ID NO: 1922 - DNA, 19 bp, Artificial
  Sequences of functional target portions for RNAi to inhibit influenza virus.
gtcgaaacgcctatcagaa

SEQ ID NO: 1923 - DNA, 19 bp, Artificial
  Sequences of functional target portions for RNAi to inhibit influenza virus.
tcgaaacgcctatcagaaa

SEQ ID NO: 1924 - DNA, 19 bp, Artificial
  Sequences of functional target portions for RNAi to inhibit influenza virus.
acgcctatcagaaacgaat

SEQ ID NO: 1925 - DNA, 19 bp, Artificial
  Sequences of functional target portions for RNAi to inhibit influenza virus.
gcaaaagcagggtgacaaa

SEQ ID NO: 1926 - DNA, 19 bp, Artificial
  Sequences of functional target portions for RNAi to inhibit influenza virus.
aagcagggtgacaaagaca

SEQ ID NO: 1927 - DNA, 19 bp, Artificial
  Sequences of functional target portions for RNAi to inhibit influenza virus.
gcagggtgacaaagacata

SEQ ID NO: 1928 - DNA, 19 bp, Artificial
  Sequences of functional target portions for RNAi to inhibit influenza virus.
gtgacaaagacataatgga

SEQ ID NO: 1929 - DNA, 19 bp, Artificial
  Sequences of functional target portions for RNAi to inhibit influenza virus.
tgacaaagacataatggat

SEQ ID NO: 1930 - DNA, 19 bp, Artificial
  Sequences of functional target portions for RNAi to inhibit influenza virus.
gacaaagacataatggatc

SEQ ID NO: 1931 - DNA, 19 bp, Artificial
  Sequences of functional target portions for RNAi to inhibit influenza virus.
acaaagacataatggatcc

SEQ ID NO: 1932 - DNA, 19 bp, Artificial
  Sequences of functional target portions for RNAi to inhibit influenza virus.
aagacataatggatccaaa

SEQ ID NO: 1933 - DNA, 19 bp, Artificial
  Sequences of functional target portions for RNAi to inhibit influenza virus.
cataatggatccaaacact

SEQ ID NO: 1934 - DNA, 19 bp, Artificial
  Sequences of functional target portions for RNAi to inhibit influenza virus.
ggatccaaacactgtgtca

SEQ ID NO: 1935 - DNA, 19 bp, Artificial
  Sequences of functional target portions for RNAi to inhibit influenza virus.
gatccaaacactgtgtcaa

SEQ ID NO: 1936 - DNA, 19 bp, Artificial
  Sequences of functional target portions for RNAi to inhibit influenza virus.
gtgtcaagctttcaggtag

SEQ ID NO: 1937 - DNA, 19 bp, Artificial
  Sequences of functional target portions for RNAi to inhibit influenza virus.
tgtcaagctttcaggtaga

SEQ ID NO: 1938 - DNA, 19 bp, Artificial
  Sequences of functional target portions for RNAi to inhibit influenza virus.
gctttcaggtagattgctt

SEQ ID NO: 1939 - DNA, 19 bp, Artificial
  Sequences of functional target portions for RNAi to inhibit influenza virus.
ccgcaaacgagttgcagac

SEQ ID NO: 1940 - DNA, 19 bp, Artificial
  Sequences of functional target portions for RNAi to inhibit influenza virus.
gcaaacgagttgcagacca

SEQ ID NO: 1941 - DNA, 19 bp, Artificial
  Sequences of functional target portions for RNAi to inhibit influenza virus.
caaacgagttgcagaccaa

SEQ ID NO: 1942 - DNA, 19 bp, Artificial
  Sequences of functional target portions for RNAi to inhibit influenza virus.
agttgcagaccaagaacta

SEQ ID NO: 1943 - DNA, 19 bp, Artificial
  Sequences of functional target portions for RNAi to inhibit influenza virus.
agaccaagaactaggtgat

SEQ ID NO: 1944 - DNA, 19 bp, Artificial
  Sequences of functional target portions for RNAi to inhibit influenza virus.
cgagatcagaaatccctaa

SEQ ID NO: 1945 - DNA, 19 bp, Artificial
  Sequences of functional target portions for RNAi to inhibit influenza virus.
tcagaaatccctaagagga

SEQ ID NO: 1946 - DNA, 19 bp, Artificial
  Sequences of functional target portions for RNAi to inhibit influenza virus.
cagaaatccctaagaggaa

SEQ ID NO: 1947 - DNA, 19 bp, Artificial
  Sequences of functional target portions for RNAi to inhibit influenza virus.
cggtctggacatcgagaca

SEQ ID NO: 1948 - DNA, 19 bp, Artificial
  Sequences of functional target portions for RNAi to inhibit influenza virus.
ggacatcgagacagccaca

SEQ ID NO: 1949 - DNA, 19 bp, Artificial
  Sequences of functional target portions for RNAi to inhibit influenza virus.
cagccacacgtgctggaaa

SEQ ID NO: 1950 - DNA, 19 bp, Artificial
  Sequences of functional target portions for RNAi to inhibit influenza virus.
ctggaaagcagatagtgga

SEQ ID NO: 1951 - DNA, 19 bp, Artificial
  Sequences of functional target portions for RNAi to inhibit influenza virus.
agcagatagtggagcggat

SEQ ID NO: 1952 - DNA, 19 bp, Artificial
  Sequences of functional target portions for RNAi to inhibit influenza virus.
gcagatagtggagcggatt

SEQ ID NO: 1953 - DNA, 19 bp, Artificial
  Sequences of functional target portions for RNAi to inhibit influenza virus.
tggagcggattctgaaaga

SEQ ID NO: 1954 - DNA, 19 bp, Artificial
  Sequences of functional target portions for RNAi to inhibit influenza virus.
gagcggattctgaaagaag

SEQ ID NO: 1955 - DNA, 19 bp, Artificial
  Sequences of functional target portions for RNAi to inhibit influenza virus.
gcggattctgaaagaagaa

SEQ ID NO: 1956 - DNA, 19 bp, Artificial
  Sequences of functional target portions for RNAi to inhibit influenza virus.
tgaaagaagaatccgatga

SEQ ID NO: 1957 - DNA, 19 bp, Artificial
  Sequences of functional target portions for RNAi to inhibit influenza virus.
agaagaatccgatgaggca

SEQ ID NO: 1958 - DNA, 19 bp, Artificial
  Sequences of functional target portions for RNAi to inhibit influenza virus.
ccgatgaggcacttaaaat

SEQ ID NO: 1959 - DNA, 19 bp, Artificial
  Sequences of functional target portions for RNAi to inhibit influenza virus.
tgacatgactcttgaggaa

SEQ ID NO: 1960 - DNA, 19 bp, Artificial
  Sequences of functional target portions for RNAi to inhibit influenza virus.
acatgactcttgaggaaat

SEQ ID NO: 1961 - DNA, 19 bp, Artificial
  Sequences of functional target portions for RNAi to inhibit influenza virus.
gaggaaatgtcaagggact

SEQ ID NO: 1962 - DNA, 19 bp, Artificial
  Sequences of functional target portions for RNAi to inhibit influenza virus.
gggactggtccatgctcat

SEQ ID NO: 1963 - DNA, 19 bp, Artificial
  Sequences of functional target portions for RNAi to inhibit influenza virus.
ggtccatgctcatacccaa

SEQ ID NO: 1964 - DNA, 19 bp, Artificial
  Sequences of functional target portions for RNAi to inhibit influenza virus.
gctcatacccaagcagaaa

SEQ ID NO: 1965 - DNA, 19 bp, Artificial
  Sequences of functional target portions for RNAi to inhibit influenza virus.
gcagaaagtggcaggccct

SEQ ID NO: 1966 - DNA, 19 bp, Artificial
  Sequences of functional target portions for RNAi to inhibit influenza virus.
tcagaatggaccaggcgat

SEQ ID NO: 1967 - DNA, 19 bp, Artificial
  Sequences of functional target portions for RNAi to inhibit influenza virus.
gaatggaccaggcgatcat

SEQ ID NO: 1968 - DNA, 19 bp, Artificial
  Sequences of functional target portions for RNAi to inhibit influenza virus.
gaccaggcgatcatggata

SEQ ID NO: 1969 - DNA, 19 bp, Artificial
  Sequences of functional target portions for RNAi to inhibit influenza virus.
accaggcgatcatggataa

SEQ ID NO: 1970 - DNA, 19 bp, Artificial
  Sequences of functional target portions for RNAi to inhibit influenza virus.
aggcgatcatggataagaa

SEQ ID NO: 1971 - DNA, 19 bp, Artificial
  Sequences of functional target portions for RNAi to inhibit influenza virus.
gcgatcatggataagaaca

SEQ ID NO: 1972 - DNA, 19 bp, Artificial
  Sequences of functional target portions for RNAi to inhibit influenza virus.
cgatcatggataagaacat

SEQ ID NO: 1973 - DNA, 19 bp, Artificial
  Sequences of functional target portions for RNAi to inhibit influenza virus.
gataagaacatcatactga

SEQ ID NO: 1974 - DNA, 19 bp, Artificial
  Sequences of functional target portions for RNAi to inhibit influenza virus.
ataagaacatcatactgaa

SEQ ID NO: 1975 - DNA, 19 bp, Artificial
  Sequences of functional target portions for RNAi to inhibit influenza virus.
taagaacatcatactgaaa

SEQ ID NO: 1976 - DNA, 19 bp, Artificial
  Sequences of functional target portions for RNAi to inhibit influenza virus.
acatcatactgaaagcgaa

SEQ ID NO: 1977 - DNA, 19 bp, Artificial
  Sequences of functional target portions for RNAi to inhibit influenza virus.
catcatactgaaagcgaac

SEQ ID NO: 1978 - DNA, 19 bp, Artificial
  Sequences of functional target portions for RNAi to inhibit influenza virus.
aaagcgaacttcagtgtga

SEQ ID NO: 1979 - DNA, 19 bp, Artificial
  Sequences of functional target portions for RNAi to inhibit influenza virus.
cggctggagactctaatat

SEQ ID NO: 1980 - DNA, 19 bp, Artificial
  Sequences of functional target portions for RNAi to inhibit influenza virus.
ctaatattgctaagggctt

SEQ ID NO: 1981 - DNA, 19 bp, Artificial
  Sequences of functional target portions for RNAi to inhibit influenza virus.
taatattgctaagggcttt

SEQ ID NO: 1982 - DNA, 19 bp, Artificial
  Sequences of functional target portions for RNAi to inhibit influenza virus.
gctaagggctttcaccgaa

SEQ ID NO: 1983 - DNA, 19 bp, Artificial
  Sequences of functional target portions for RNAi to inhibit influenza virus.
caccgaagagggagcaatt

SEQ ID NO: 1984 - DNA, 19 bp, Artificial
  Sequences of functional target portions for RNAi to inhibit influenza virus.
ccgaagagggagcaattgt

SEQ ID NO: 1985 - DNA, 19 bp, Artificial
  Sequences of functional target portions for RNAi to inhibit influenza virus.
gggagcaattgttggcgaa

SEQ ID NO: 1986 - DNA, 19 bp, Artificial
  Sequences of functional target portions for RNAi to inhibit influenza virus.
ggagcaattgttggcgaaa

SEQ ID NO: 1987 - DNA, 19 bp, Artificial
  Sequences of functional target portions for RNAi to inhibit influenza virus.
gagcaattgttggcgaaat

SEQ ID NO: 1988 - DNA, 19 bp, Artificial
  Sequences of functional target portions for RNAi to inhibit influenza virus.
agcaattgttggcgaaatt

SEQ ID NO: 1989 - DNA, 19 bp, Artificial
  Sequences of functional target portions for RNAi to inhibit influenza virus.
aggacatactgctgaggat

SEQ ID NO: 1990 - DNA, 19 bp, Artificial
  Sequences of functional target portions for RNAi to inhibit influenza virus.
ctgctgaggatgtcaaaaa

SEQ ID NO: 1991 - DNA, 19 bp, Artificial
  Sequences of functional target portions for RNAi to inhibit influenza virus.
tgtcaaaaatgcagttgga

SEQ ID NO: 1992 - DNA, 19 bp, Artificial
  Sequences of functional target portions for RNAi to inhibit influenza virus.
tcaaaaatgcagttggagt

SEQ ID NO: 1993 - DNA, 19 bp, Artificial
  Sequences of functional target portions for RNAi to inhibit influenza virus.
ggacttgaatggaatgata

SEQ ID NO: 1994 - DNA, 19 bp, Artificial
  Sequences of functional target portions for RNAi to inhibit influenza virus.
gacttgaatggaatgataa

SEQ ID NO: 1995 - DNA, 19 bp, Artificial
  Sequences of functional target portions for RNAi to inhibit influenza virus.
tgaatggaatgataacaca

SEQ ID NO: 1996 - DNA, 19 bp, Artificial
  Sequences of functional target portions for RNAi to inhibit influenza virus.
gaatgataacacagttcga

SEQ ID NO: 1997 - DNA, 19 bp, Artificial
  Sequences of functional target portions for RNAi to inhibit influenza virus.
taacacagttcgagtctct

SEQ ID NO: 1998 - DNA, 19 bp, Artificial
  Sequences of functional target portions for RNAi to inhibit influenza virus.
agttcgagtctctgaaact

SEQ ID NO: 1999 - DNA, 19 bp, Artificial
  Sequences of functional target portions for RNAi to inhibit influenza virus.
ctctgaaactctacagaga

SEQ ID NO: 2000 - DNA, 19 bp, Artificial
  Sequences of functional target portions for RNAi to inhibit influenza virus.
ctgaaactctacagagatt

SEQ ID NO: 2001 - DNA, 19 bp, Artificial
  Sequences of functional target portions for RNAi to inhibit influenza virus.
acagagattcgcttggaga

SEQ ID NO: 2002 - DNA, 19 bp, Artificial
  Sequences of functional target portions for RNAi to inhibit influenza virus.
cagagattcgcttggagaa

SEQ ID NO: 2003 - DNA, 19 bp, Artificial
  Sequences of functional target portions for RNAi to inhibit influenza virus.
tggagaagcagtaatgaga

SEQ ID NO: 2004 - DNA, 19 bp, Artificial
  Sequences of functional target portions for RNAi to inhibit influenza virus.
ggagaagcagtaatgagaa

SEQ ID NO: 2005 - DNA, 19 bp, Artificial
  Sequences of functional target portions for RNAi to inhibit influenza virus.
gagaagcagtaatgagaat

SEQ ID NO: 2006 - DNA, 19 bp, Artificial
  Sequences of functional target portions for RNAi to inhibit influenza virus.
cagtaatgagaatgggaga

SEQ ID NO: 2007 - DNA, 19 bp, Artificial
  Sequences of functional target portions for RNAi to inhibit influenza virus.
ccaaaacagaaacgagaaa

SEQ ID NO: 2008 - DNA, 19 bp, Artificial
  Sequences of functional target portions for RNAi to inhibit influenza virus.
cgagaaatggcgggaacaa

SEQ ID NO: 2009 - DNA, 19 bp, Artificial
  Sequences of functional target portions for RNAi to inhibit influenza virus.
gagaaatggcgggaacaat

SEQ ID NO: 2010 - DNA, 19 bp, Artificial
  Sequences of functional target portions for RNAi to inhibit influenza virus.
agaaatggcgggaacaatt

SEQ ID NO: 2011 - DNA, 19 bp, Artificial
  Sequences of functional target portions for RNAi to inhibit influenza virus.
gaaatggcgggaacaatta

SEQ ID NO: 2012 - DNA, 19 bp, Artificial
  Sequences of functional target portions for RNAi to inhibit influenza virus.
gggaacaattaggtcagaa

SEQ ID NO: 2013 - DNA, 19 bp, Artificial
  Sequences of functional target portions for RNAi to inhibit influenza virus.
ggaacaattaggtcagaag

SEQ ID NO: 2014 - DNA, 19 bp, Artificial
  Sequences of functional target portions for RNAi to inhibit influenza virus.
aacaattaggtcagaagtt

SEQ ID NO: 2015 - DNA, 19 bp, Artificial
  Sequences of functional target portions for RNAi to inhibit influenza virus.
acaattaggtcagaagttt

SEQ ID NO: 2016 - DNA, 19 bp, Artificial
  Sequences of functional target portions for RNAi to inhibit influenza virus.
aggtcagaagtttgaagaa

SEQ ID NO: 2017 - DNA, 19 bp, Artificial
  Sequences of functional target portions for RNAi to inhibit influenza virus.
ggtcagaagtttgaagaaa

SEQ ID NO: 2018 - DNA, 19 bp, Artificial
  Sequences of functional target portions for RNAi to inhibit influenza virus.
gtcagaagtttgaagaaat

SEQ ID NO: 2019 - DNA, 19 bp, Artificial
  Sequences of functional target portions for RNAi to inhibit influenza virus.
tcagaagtttgaagaaata

SEQ ID NO: 2020 - DNA, 19 bp, Artificial
  Sequences of functional target portions for RNAi to inhibit influenza virus.
gaagtttgaagaaataaga

SEQ ID NO: 2021 - DNA, 19 bp, Artificial
  Sequences of functional target portions for RNAi to inhibit influenza virus.
tgaagaaataagatggttg

SEQ ID NO: 2022 - DNA, 19 bp, Artificial
  Sequences of functional target portions for RNAi to inhibit influenza virus.
gaagaaataagatggttga

SEQ ID NO: 2023 - DNA, 19 bp, Artificial
  Sequences of functional target portions for RNAi to inhibit influenza virus.
agaaataagatggttgatt

SEQ ID NO: 2024 - DNA, 19 bp, Artificial
  Sequences of functional target portions for RNAi to inhibit influenza virus.
gaaataagatggttgattg

SEQ ID NO: 2025 - DNA, 19 bp, Artificial
  Sequences of functional target portions for RNAi to inhibit influenza virus.
aaataagatggttgattga

SEQ ID NO: 2026 - DNA, 19 bp, Artificial
  Sequences of functional target portions for RNAi to inhibit influenza virus.
taagatggttgattgaaga

SEQ ID NO: 2027 - DNA, 19 bp, Artificial
  Sequences of functional target portions for RNAi to inhibit influenza virus.
gatggttgattgaagaagt

SEQ ID NO: 2028 - DNA, 19 bp, Artificial
  Sequences of functional target portions for RNAi to inhibit influenza virus.
gttgattgaagaagtgaga

SEQ ID NO: 2029 - DNA, 19 bp, Artificial
  Sequences of functional target portions for RNAi to inhibit influenza virus.
tgattgaagaagtgagaca

SEQ ID NO: 2030 - DNA, 19 bp, Artificial
  Sequences of functional target portions for RNAi to inhibit influenza virus.
attgaagaagtgagacaca

SEQ ID NO: 2031 - DNA, 19 bp, Artificial
  Sequences of functional target portions for RNAi to inhibit influenza virus.
ttgaagaagtgagacacaa

SEQ ID NO: 2032 - DNA, 19 bp, Artificial
  Sequences of functional target portions for RNAi to inhibit influenza virus.
tgaagaagtgagacacaaa

SEQ ID NO: 2033 - DNA, 19 bp, Artificial
  Sequences of functional target portions for RNAi to inhibit influenza virus.
gaagtgagacacaaactga

SEQ ID NO: 2034 - DNA, 19 bp, Artificial
  Sequences of functional target portions for RNAi to inhibit influenza virus.
gagacacaaactgaagata

SEQ ID NO: 2035 - DNA, 19 bp, Artificial
  Sequences of functional target portions for RNAi to inhibit influenza virus.
agacacaaactgaagataa

SEQ ID NO: 2036 - DNA, 19 bp, Artificial
  Sequences of functional target portions for RNAi to inhibit influenza virus.
gacacaaactgaagataac

SEQ ID NO: 2037 - DNA, 19 bp, Artificial
  Sequences of functional target portions for RNAi to inhibit influenza virus.
aaactgaagataacagaga

SEQ ID NO: 2038 - DNA, 19 bp, Artificial
  Sequences of functional target portions for RNAi to inhibit influenza virus.
actgaagataacagagaat

SEQ ID NO: 2039 - DNA, 19 bp, Artificial
  Sequences of functional target portions for RNAi to inhibit influenza virus.
ctgaagataacagagaata

SEQ ID NO: 2040 - DNA, 19 bp, Artificial
  Sequences of functional target portions for RNAi to inhibit influenza virus.
tgaagataacagagaatag

SEQ ID NO: 2041 - DNA, 19 bp, Artificial
  Sequences of functional target portions for RNAi to inhibit influenza virus.
agataacagagaatagttt

SEQ ID NO: 2042 - DNA, 19 bp, Artificial
  Sequences of functional target portions for RNAi to inhibit influenza virus.
agagaatagttttgagcaa

SEQ ID NO: 2043 - DNA, 19 bp, Artificial
  Sequences of functional target portions for RNAi to inhibit influenza virus.
gagaatagttttgagcaaa

SEQ ID NO: 2044 - DNA, 19 bp, Artificial
  Sequences of functional target portions for RNAi to inhibit influenza virus.
agaatagttttgagcaaat

SEQ ID NO: 2045 - DNA, 19 bp, Artificial
  Sequences of functional target portions for RNAi to inhibit influenza virus.
gcaaataacatttatgcaa

SEQ ID NO: 2046 - DNA, 19 bp, Artificial
  Sequences of functional target portions for RNAi to inhibit influenza virus.
caaataacatttatgcaag

SEQ ID NO: 2047 - DNA, 19 bp, Artificial
  Sequences of functional target portions for RNAi to inhibit influenza virus.
taacatttatgcaagcctt

SEQ ID NO: 2048 - DNA, 19 bp, Artificial
  Sequences of functional target portions for RNAi to inhibit influenza virus.
tatgcaagccttacatcta

SEQ ID NO: 2049 - DNA, 19 bp, Artificial
  Sequences of functional target portions for RNAi to inhibit influenza virus.
ccttacatctattgcttga

SEQ ID NO: 2050 - DNA, 19 bp, Artificial
  Sequences of functional target portions for RNAi to inhibit influenza virus.
tgcttgaagtggagcaaga

SEQ ID NO: 2051 - DNA, 19 bp, Artificial
  Sequences of functional target portions for RNAi to inhibit influenza virus.
tgaagtggagcaagagata

SEQ ID NO: 2052 - DNA, 19 bp, Artificial
  Sequences of functional target portions for RNAi to inhibit influenza virus.
aagtggagcaagagataag

SEQ ID NO: 2053 - DNA, 19 bp, Artificial
  Sequences of functional target portions for RNAi to inhibit influenza virus.
ggagcaagagataagaact

SEQ ID NO: 2054 - DNA, 19 bp, Artificial
  Sequences of functional target portions for RNAi to inhibit influenza virus.
gagcaagagataagaactt

SEQ ID NO: 2055 - DNA, 19 bp, Artificial
  Sequences of functional target portions for RNAi to inhibit influenza virus.
gataagaactttctcgttt

SEQ ID NO: 2056 - DNA, 19 bp, Artificial
  Sequences of functional target portions for RNAi to inhibit influenza virus.
cgtttcagcttatttaata

SEQ ID NO: 2057 - DNA, 19 bp, Artificial
  Sequences of functional target portions for RNAi to inhibit influenza virus.
gtttcagcttatttaataa

SEQ ID NO: 2058 - DNA, 19 bp, Artificial
  Sequences of functional target portions for RNAi to inhibit influenza virus.
tcagcttatttaataataa

SEQ ID NO: 2059 - DNA, 19 bp, Artificial
  Sequences of functional target portions for RNAi to inhibit influenza virus.
cagcttatttaataataaa

SEQ ID NO: 2060 - DNA, 19 bp, Artificial
  Sequences of functional target portions for RNAi to inhibit influenza virus.
gcttatttaataataaaaa

SEQ ID NO: 2061 - DNA, 19 bp, Artificial
  Sequences of functional target portions for RNAi to inhibit influenza virus.
cttatttaataataaaaaa

SEQ ID NO: 2062 - DNA, 19 bp, Artificial
  Sequences of functional target portions for RNAi to inhibit influenza virus.
gtgtcaagctttcaggaca

SEQ ID NO: 2063 - DNA, 19 bp, Artificial
  Sequences of functional target portions for RNAi to inhibit influenza virus.
tgtcaagctttcaggacat

SEQ ID NO: 2064 - DNA, 19 bp, Artificial
  Sequences of functional target portions for RNAi to inhibit influenza virus.
caaaagcaggggaaaataa

SEQ ID NO: 2065 - DNA, 19 bp, Artificial
  Sequences of functional target portions for RNAi to inhibit influenza virus.
gggaaaataaaaacaacca

SEQ ID NO: 2066 - DNA, 19 bp, Artificial
  Sequences of functional target portions for RNAi to inhibit influenza virus.
ggaaaataaaaacaaccaa

SEQ ID NO: 2067 - DNA, 19 bp, Artificial
  Sequences of functional target portions for RNAi to inhibit influenza virus.
gaaaataaaaacaaccaaa

SEQ ID NO: 2068 - DNA, 19 bp, Artificial
  Sequences of functional target portions for RNAi to inhibit influenza virus.
aaaataaaaacaaccaaaa

SEQ ID NO: 2069 - DNA, 19 bp, Artificial
  Sequences of functional target portions for RNAi to inhibit influenza virus.
aaataaaaacaaccaaaat

SEQ ID NO: 2070 - DNA, 19 bp, Artificial
  Sequences of functional target portions for RNAi to inhibit influenza virus.
ataaaaacaaccaaaatga

SEQ ID NO: 2071 - DNA, 19 bp, Artificial
  Sequences of functional target portions for RNAi to inhibit influenza virus.
caaccaaaatgaaggcaaa

SEQ ID NO: 2072 - DNA, 19 bp, Artificial
  Sequences of functional target portions for RNAi to inhibit influenza virus.
caaaatgaaggcaaaccta

SEQ ID NO: 2073 - DNA, 19 bp, Artificial
  Sequences of functional target portions for RNAi to inhibit influenza virus.
aggcaaacctactggtcct

SEQ ID NO: 2074 - DNA, 19 bp, Artificial
  Sequences of functional target portions for RNAi to inhibit influenza virus.
ctgcagatgcagacacaat

SEQ ID NO: 2075 - DNA, 19 bp, Artificial
  Sequences of functional target portions for RNAi to inhibit influenza virus.
gcagatgcagacacaatat

SEQ ID NO: 2076 - DNA, 19 bp, Artificial
  Sequences of functional target portions for RNAi to inhibit influenza virus.
atgcagacacaatatgtat

SEQ ID NO: 2077 - DNA, 19 bp, Artificial
  Sequences of functional target portions for RNAi to inhibit influenza virus.
cacaatatgtataggctac

SEQ ID NO: 2078 - DNA, 19 bp, Artificial
  Sequences of functional target portions for RNAi to inhibit influenza virus.
cacaatatgtataggctac

SEQ ID NO: 2079 - DNA, 19 bp, Artificial
  Sequences of functional target portions for RNAi to inhibit influenza virus.
gtataggctaccatgcgaa

SEQ ID NO: 2080 - DNA, 19 bp, Artificial
  Sequences of functional target portions for RNAi to inhibit influenza virus.
taggctaccatgcgaacaa

SEQ ID NO: 2081 - DNA, 19 bp, Artificial
  Sequences of functional target portions for RNAi to inhibit influenza virus.
gcgaacaattcaaccgaca

SEQ ID NO: 2082 - DNA, 19 bp, Artificial
  Sequences of functional target portions for RNAi to inhibit influenza virus.
gaacaattcaaccgacact

SEQ ID NO: 2083 - DNA, 19 bp, Artificial
  Sequences of functional target portions for RNAi to inhibit influenza virus.
cgacactgttgacacagta

SEQ ID NO: 2084 - DNA, 19 bp, Artificial
  Sequences of functional target portions for RNAi to inhibit influenza virus.
tgacacagtactcgagaag

SEQ ID NO: 2085 - DNA, 19 bp, Artificial
  Sequences of functional target portions for RNAi to inhibit influenza virus.
acacagtactcgagaagaa

SEQ ID NO: 2086 - DNA, 19 bp, Artificial
  Sequences of functional target portions for RNAi to inhibit influenza virus.
tcgagaagaatgtgacagt

SEQ ID NO: 2087 - DNA, 19 bp, Artificial
  Sequences of functional target portions for RNAi to inhibit influenza virus.
gagaagaatgtgacagtga

SEQ ID NO: 2088 - DNA, 19 bp, Artificial
  Sequences of functional target portions for RNAi to inhibit influenza virus.
gaagaatgtgacagtgaca

SEQ ID NO: 2089 - DNA, 19 bp, Artificial
  Sequences of functional target portions for RNAi to inhibit influenza virus.
agaatgtgacagtgacaca

SEQ ID NO: 2090 - DNA, 19 bp, Artificial
  Sequences of functional target portions for RNAi to inhibit influenza virus.
ctgttaacctgctcgaaga

SEQ ID NO: 2091 - DNA, 19 bp, Artificial
  Sequences of functional target portions for RNAi to inhibit influenza virus.
gaagacagccacaacggaa

SEQ ID NO: 2092 - DNA, 19 bp, Artificial
  Sequences of functional target portions for RNAi to inhibit influenza virus.
aagacagccacaacggaaa

SEQ ID NO: 2093 - DNA, 19 bp, Artificial
  Sequences of functional target portions for RNAi to inhibit influenza virus.
acggaaaactatgtagatt

SEQ ID NO: 2094 - DNA, 19 bp, Artificial
  Sequences of functional target portions for RNAi to inhibit influenza virus.
cggaaaactatgtagatta

SEQ ID NO: 2095 - DNA, 19 bp, Artificial
  Sequences of functional target portions for RNAi to inhibit influenza virus.
ggaaaactatgtagattaa

SEQ ID NO: 2096 - DNA, 19 bp, Artificial
  Sequences of functional target portions for RNAi to inhibit influenza virus.
aaaactatgtagattaaaa

SEQ ID NO: 2097 - DNA, 19 bp, Artificial
  Sequences of functional target portions for RNAi to inhibit influenza virus.
ctatgtagattaaaaggaa

SEQ ID NO: 2098 - DNA, 19 bp, Artificial
  Sequences of functional target portions for RNAi to inhibit influenza virus.
atgtagattaaaaggaata

SEQ ID NO: 2099 - DNA, 19 bp, Artificial
  Sequences of functional target portions for RNAi to inhibit influenza virus.
aggaatagccccactacaa

SEQ ID NO: 2100 - DNA, 19 bp, Artificial
  Sequences of functional target portions for RNAi to inhibit influenza virus.
ccggatggctcttgggaaa

SEQ ID NO: 2101 - DNA, 19 bp, Artificial
  Sequences of functional target portions for RNAi to inhibit influenza virus.
tgggaaacccagaatgcga

SEQ ID NO: 2102 - DNA, 19 bp, Artificial
  Sequences of functional target portions for RNAi to inhibit influenza virus.
ccagtgagatcatggtcct

SEQ ID NO: 2103 - DNA, 19 bp, Artificial
  Sequences of functional target portions for RNAi to inhibit influenza virus.
gatcatggtcctacattgt

SEQ ID NO: 2104 - DNA, 19 bp, Artificial
  Sequences of functional target portions for RNAi to inhibit influenza virus.
ggtcctacattgtagaaac

SEQ ID NO: 2105 - DNA, 19 bp, Artificial
  Sequences of functional target portions for RNAi to inhibit influenza virus.
gtcctacattgtagaaaca

SEQ ID NO: 2106 - DNA, 19 bp, Artificial
  Sequences of functional target portions for RNAi to inhibit influenza virus.
ctacattgtagaaacacca

SEQ ID NO: 2107 - DNA, 19 bp, Artificial
  Sequences of functional target portions for RNAi to inhibit influenza virus.
ccaaactctgagaatggaa

SEQ ID NO: 2108 - DNA, 19 bp, Artificial
  Sequences of functional target portions for RNAi to inhibit influenza virus.
aaactctgagaatggaata

SEQ ID NO: 2109 - DNA, 19 bp, Artificial
  Sequences of functional target portions for RNAi to inhibit influenza virus.
ctgagaatggaatatgtta

SEQ ID NO: 2110 - DNA, 19 bp, Artificial
  Sequences of functional target portions for RNAi to inhibit influenza virus.
tgagaatggaatatgttat

SEQ ID NO: 2111 - DNA, 19 bp, Artificial
  Sequences of functional target portions for RNAi to inhibit influenza virus.
gagaatggaatatgttatc

SEQ ID NO: 2112 - DNA, 19 bp, Artificial
  Sequences of functional target portions for RNAi to inhibit influenza virus.
gaatggaatatgttatcca

SEQ ID NO: 2113 - DNA, 19 bp, Artificial
  Sequences of functional target portions for RNAi to inhibit influenza virus.
tggaatatgttatccagga

SEQ ID NO: 2114 - DNA, 19 bp, Artificial
  Sequences of functional target portions for RNAi to inhibit influenza virus.
gaatatgttatccaggaga

SEQ ID NO: 2115 - DNA, 19 bp, Artificial
  Sequences of functional target portions for RNAi to inhibit influenza virus.
aatatgttatccaggagat

SEQ ID NO: 2116 - DNA, 19 bp, Artificial
  Sequences of functional target portions for RNAi to inhibit influenza virus.
caggagatttcatcgacta

SEQ ID NO: 2117 - DNA, 19 bp, Artificial
  Sequences of functional target portions for RNAi to inhibit influenza virus.
gagatttcatcgactatga

SEQ ID NO: 2118 - DNA, 19 bp, Artificial
  Sequences of functional target portions for RNAi to inhibit influenza virus.
actatgaggagctgaggga

SEQ ID NO: 2119 - DNA, 19 bp, Artificial
  Sequences of functional target portions for RNAi to inhibit influenza virus.
gagctgagggagcaattga

SEQ ID NO: 2120 - DNA, 19 bp, Artificial
  Sequences of functional target portions for RNAi to inhibit influenza virus.
gagcaattgagctcagtgt

SEQ ID NO: 2121 - DNA, 19 bp, Artificial
  Sequences of functional target portions for RNAi to inhibit influenza virus.
gcaattgagctcagtgtca

SEQ ID NO: 2122 - DNA, 19 bp, Artificial
  Sequences of functional target portions for RNAi to inhibit influenza virus.
tgtcatcattcgaaagatt

SEQ ID NO: 2123 - DNA, 19 bp, Artificial
  Sequences of functional target portions for RNAi to inhibit influenza virus.
cattcgaaagattcgaaat

SEQ ID NO: 2124 - DNA, 19 bp, Artificial
  Sequences of functional target portions for RNAi to inhibit influenza virus.
attcgaaagattcgaaata

SEQ ID NO: 2125 - DNA, 19 bp, Artificial
  Sequences of functional target portions for RNAi to inhibit influenza virus.
tcgaaagattcgaaatatt

SEQ ID NO: 2126 - DNA, 19 bp, Artificial
  Sequences of functional target portions for RNAi to inhibit influenza virus.
cgaaagattcgaaatattt

SEQ ID NO: 2127 - DNA, 19 bp, Artificial
  Sequences of functional target portions for RNAi to inhibit influenza virus.
gattcgaaatatttcccaa

SEQ ID NO: 2128 - DNA, 19 bp, Artificial
  Sequences of functional target portions for RNAi to inhibit influenza virus.
attcgaaatatttcccaaa

SEQ ID NO: 2129 - DNA, 19 bp, Artificial
  Sequences of functional target portions for RNAi to inhibit influenza virus.
tcgaaatatttcccaaaga

SEQ ID NO: 2130 - DNA, 19 bp, Artificial
  Sequences of functional target portions for RNAi to inhibit influenza virus.
cgaaatatttcccaaagaa

SEQ ID NO: 2131 - DNA, 19 bp, Artificial
  Sequences of functional target portions for RNAi to inhibit influenza virus.
gaaatatttcccaaagaaa

SEQ ID NO: 2132 - DNA, 19 bp, Artificial
  Sequences of functional target portions for RNAi to inhibit influenza virus.
aaagaaagctcatggccca

SEQ ID NO: 2133 - DNA, 19 bp, Artificial
  Sequences of functional target portions for RNAi to inhibit influenza virus.
gctcatggcccaaccacaa

SEQ ID NO: 2134 - DNA, 19 bp, Artificial
  Sequences of functional target portions for RNAi to inhibit influenza virus.
ggcccaaccacaacacaaa

SEQ ID NO: 2135 - DNA, 19 bp, Artificial
  Sequences of functional target portions for RNAi to inhibit influenza virus.
ccacaacacaaacggagta

SEQ ID NO: 2136 - DNA, 19 bp, Artificial
  Sequences of functional target portions for RNAi to inhibit influenza virus.
aaagcagtttttacagaaa

SEQ ID NO: 2137 - DNA, 19 bp, Artificial
  Sequences of functional target portions for RNAi to inhibit influenza virus.
agaaatttgctatggctga

SEQ ID NO: 2138 - DNA, 19 bp, Artificial
  Sequences of functional target portions for RNAi to inhibit influenza virus.
ttgctatggctgacggaga

SEQ ID NO: 2139 - DNA, 19 bp, Artificial
  Sequences of functional target portions for RNAi to inhibit influenza virus.
tgctatggctgacggagaa

SEQ ID NO: 2140 - DNA, 19 bp, Artificial
  Sequences of functional target portions for RNAi to inhibit influenza virus.
tgacggagaaggagggctc

SEQ ID NO: 2141 - DNA, 19 bp, Artificial
  Sequences of functional target portions for RNAi to inhibit influenza virus.
cggagaaggagggctcata

SEQ ID NO: 2142 - DNA, 19 bp, Artificial
  Sequences of functional target portions for RNAi to inhibit influenza virus.
aaggagggctcatacccaa

SEQ ID NO: 2143 - DNA, 19 bp, Artificial
  Sequences of functional target portions for RNAi to inhibit influenza virus.
gctcatacccaaagctgaa

SEQ ID NO: 2144 - DNA, 19 bp, Artificial
  Sequences of functional target portions for RNAi to inhibit influenza virus.
ctgaaaaattcttatgtga

SEQ ID NO: 2145 - DNA, 19 bp, Artificial
  Sequences of functional target portions for RNAi to inhibit influenza virus.
tgaaaaattcttatgtgaa

SEQ ID NO: 2146 - DNA, 19 bp, Artificial
  Sequences of functional target portions for RNAi to inhibit influenza virus.
gaaaaattcttatgtgaac

SEQ ID NO: 2147 - DNA, 19 bp, Artificial
  Sequences of functional target portions for RNAi to inhibit influenza virus.
attcttatgtgaacaaaaa

SEQ ID NO: 2148 - DNA, 19 bp, Artificial
  Sequences of functional target portions for RNAi to inhibit influenza virus.
tgtgaacaaaaaagggaaa

SEQ ID NO: 2149 - DNA, 19 bp, Artificial
  Sequences of functional target portions for RNAi to inhibit influenza virus.
gaacaaaaaagggaaagaa

SEQ ID NO: 2150 - DNA, 19 bp, Artificial
  Sequences of functional target portions for RNAi to inhibit influenza virus.
acaaaaaagggaaagaagt

SEQ ID NO: 2151 - DNA, 19 bp, Artificial
  Sequences of functional target portions for RNAi to inhibit influenza virus.
caaaaaagggaaagaagtc

SEQ ID NO: 2152 - DNA, 19 bp, Artificial
  Sequences of functional target portions for RNAi to inhibit influenza virus.
ggaaagaagtccttgtact

SEQ ID NO: 2153 - DNA, 19 bp, Artificial
  Sequences of functional target portions for RNAi to inhibit influenza virus.
gaaagaagtccttgtactg

SEQ ID NO: 2154 - DNA, 19 bp, Artificial
  Sequences of functional target portions for RNAi to inhibit influenza virus.
ccgcctaacagtaaggaac

SEQ ID NO: 2155 - DNA, 19 bp, Artificial
  Sequences of functional target portions for RNAi to inhibit influenza virus.
cgcctaacagtaaggaaca

SEQ ID NO: 2156 - DNA, 19 bp, Artificial
  Sequences of functional target portions for RNAi to inhibit influenza virus.
gcctaacagtaaggaacaa

SEQ ID NO: 2157 - DNA, 19 bp, Artificial
  Sequences of functional target portions for RNAi to inhibit influenza virus.
acagtaaggaacaacagaa

SEQ ID NO: 2158 - DNA, 19 bp, Artificial
  Sequences of functional target portions for RNAi to inhibit influenza virus.
cagtaaggaacaacagaat

SEQ ID NO: 2159 - DNA, 19 bp, Artificial
  Sequences of functional target portions for RNAi to inhibit influenza virus.
agtaaggaacaacagaata

SEQ ID NO: 2160 - DNA, 19 bp, Artificial
  Sequences of functional target portions for RNAi to inhibit influenza virus.
gtaaggaacaacagaatat

SEQ ID NO: 2161 - DNA, 19 bp, Artificial
  Sequences of functional target portions for RNAi to inhibit influenza virus.
aggaacaacagaatatcta

SEQ ID NO: 2162 - DNA, 19 bp, Artificial
  Sequences of functional target portions for RNAi to inhibit influenza virus.
ggaacaacagaatatctat

SEQ ID NO: 2163 - DNA, 19 bp, Artificial
  Sequences of functional target portions for RNAi to inhibit influenza virus.
caacagaatatctatcaga

SEQ ID NO: 2164 - DNA, 19 bp, Artificial
  Sequences of functional target portions for RNAi to inhibit influenza virus.
aacagaatatctatcagaa

SEQ ID NO: 2165 - DNA, 19 bp, Artificial
  Sequences of functional target portions for RNAi to inhibit influenza virus.
acagaatatctatcagaat

SEQ ID NO: 2166 - DNA, 19 bp, Artificial
  Sequences of functional target portions for RNAi to inhibit influenza virus.
cagaatatctatcagaatg

SEQ ID NO: 2167 - DNA, 19 bp, Artificial
  Sequences of functional target portions for RNAi to inhibit influenza virus.
agaatatctatcagaatga

SEQ ID NO: 2168 - DNA, 19 bp, Artificial
  Sequences of functional target portions for RNAi to inhibit influenza virus.
aatatctatcagaatgaaa

SEQ ID NO: 2169 - DNA, 19 bp, Artificial
  Sequences of functional target portions for RNAi to inhibit influenza virus.
gcttatgtctctgtagtga

SEQ ID NO: 2170 - DNA, 19 bp, Artificial
  Sequences of functional target portions for RNAi to inhibit influenza virus.
ctgtagtgacttcaaatta

SEQ ID NO: 2171 - DNA, 19 bp, Artificial
  Sequences of functional target portions for RNAi to inhibit influenza virus.
tgtagtgacttcaaattat

SEQ ID NO: 2172 - DNA, 19 bp, Artificial
  Sequences of functional target portions for RNAi to inhibit influenza virus.
gtagtgacttcaaattata

SEQ ID NO: 2173 - DNA, 19 bp, Artificial
  Sequences of functional target portions for RNAi to inhibit influenza virus.
acttcaaattataacagga

SEQ ID NO: 2174 - DNA, 19 bp, Artificial
  Sequences of functional target portions for RNAi to inhibit influenza virus.
tcaaattataacaggagat

SEQ ID NO: 2175 - DNA, 19 bp, Artificial
  Sequences of functional target portions for RNAi to inhibit influenza virus.
caaattataacaggagatt

SEQ ID NO: 2176 - DNA, 19 bp, Artificial
  Sequences of functional target portions for RNAi to inhibit influenza virus.
aattataacaggagattta

SEQ ID NO: 2177 - DNA, 19 bp, Artificial
  Sequences of functional target portions for RNAi to inhibit influenza virus.
ggagatttaccccggaaat

SEQ ID NO: 2178 - DNA, 19 bp, Artificial
  Sequences of functional target portions for RNAi to inhibit influenza virus.
gagatttaccccggaaata

SEQ ID NO: 2179 - DNA, 19 bp, Artificial
  Sequences of functional target portions for RNAi to inhibit influenza virus.
cccggaaatagcagaaaga

SEQ ID NO: 2180 - DNA, 19 bp, Artificial
  Sequences of functional target portions for RNAi to inhibit influenza virus.
cggaaatagcagaaagacc

SEQ ID NO: 2181 - DNA, 19 bp, Artificial
  Sequences of functional target portions for RNAi to inhibit influenza virus.
ggaaatagcagaaagaccc

SEQ ID NO: 2182 - DNA, 19 bp, Artificial
  Sequences of functional target portions for RNAi to inhibit influenza virus.
gaaatagcagaaagaccca

SEQ ID NO: 2183 - DNA, 19 bp, Artificial
  Sequences of functional target portions for RNAi to inhibit influenza virus.
aatagcagaaagacccaaa

SEQ ID NO: 2184 - DNA, 19 bp, Artificial
  Sequences of functional target portions for RNAi to inhibit influenza virus.
gcagaaagacccaaagtaa

SEQ ID NO: 2185 - DNA, 19 bp, Artificial
  Sequences of functional target portions for RNAi to inhibit influenza virus.
cagaaagacccaaagtaag

SEQ ID NO: 2186 - DNA, 19 bp, Artificial
  Sequences of functional target portions for RNAi to inhibit influenza virus.
agaaagacccaaagtaaga

SEQ ID NO: 2187 - DNA, 19 bp, Artificial
  Sequences of functional target portions for RNAi to inhibit influenza virus.
acccaaagtaagagatcaa

SEQ ID NO: 2188 - DNA, 19 bp, Artificial
  Sequences of functional target portions for RNAi to inhibit influenza virus.
gagatcaagctgggaggat

SEQ ID NO: 2189 - DNA, 19 bp, Artificial
  Sequences of functional target portions for RNAi to inhibit influenza virus.
gatcaagctgggaggatga

SEQ ID NO: 2190 - DNA, 19 bp, Artificial
  Sequences of functional target portions for RNAi to inhibit influenza virus.
aagctgggaggatgaacta

SEQ ID NO: 2191 - DNA, 19 bp, Artificial
  Sequences of functional target portions for RNAi to inhibit influenza virus.
gctgggaggatgaactatt

SEQ ID NO: 2192 - DNA, 19 bp, Artificial
  Sequences of functional target portions for RNAi to inhibit influenza virus.
ctgggaggatgaactatta

SEQ ID NO: 2193 - DNA, 19 bp, Artificial
  Sequences of functional target portions for RNAi to inhibit influenza virus.
aggatgaactattactgga

SEQ ID NO: 2194 - DNA, 19 bp, Artificial
  Sequences of functional target portions for RNAi to inhibit influenza virus.
attactggaccttgctaaa

SEQ ID NO: 2195 - DNA, 19 bp, Artificial
  Sequences of functional target portions for RNAi to inhibit influenza virus.
gctaaaacccggagacaca

SEQ ID NO: 2196 - DNA, 19 bp, Artificial
  Sequences of functional target portions for RNAi to inhibit influenza virus.
acccggagacacaataata

SEQ ID NO: 2197 - DNA, 19 bp, Artificial
  Sequences of functional target portions for RNAi to inhibit influenza virus.
ccggagacacaataatatt

SEQ ID NO: 2198 - DNA, 19 bp, Artificial
  Sequences of functional target portions for RNAi to inhibit influenza virus.
cggagacacaataatattt

SEQ ID NO: 2199 - DNA, 19 bp, Artificial
  Sequences of functional target portions for RNAi to inhibit influenza virus.
cacaataatatttgaggca

SEQ ID NO: 2200 - DNA, 19 bp, Artificial
  Sequences of functional target portions for RNAi to inhibit influenza virus.
acaataatatttgaggcaa

SEQ ID NO: 2201 - DNA, 19 bp, Artificial
  Sequences of functional target portions for RNAi to inhibit influenza virus.
caataatatttgaggcaaa

SEQ ID NO: 2202 - DNA, 19 bp, Artificial
  Sequences of functional target portions for RNAi to inhibit influenza virus.
aataatatttgaggcaaat

SEQ ID NO: 2203 - DNA, 19 bp, Artificial
  Sequences of functional target portions for RNAi to inhibit influenza virus.
tatttgaggcaaatggaaa

SEQ ID NO: 2204 - DNA, 19 bp, Artificial
  Sequences of functional target portions for RNAi to inhibit influenza virus.
atttgaggcaaatggaaat

SEQ ID NO: 2205 - DNA, 19 bp, Artificial
  Sequences of functional target portions for RNAi to inhibit influenza virus.
tgaggcaaatggaaatcta

SEQ ID NO: 2206 - DNA, 19 bp, Artificial
  Sequences of functional target portions for RNAi to inhibit influenza virus.
gaggcaaatggaaatctaa

SEQ ID NO: 2207 - DNA, 19 bp, Artificial
  Sequences of functional target portions for RNAi to inhibit influenza virus.
aggcaaatggaaatctaat

SEQ ID NO: 2208 - DNA, 19 bp, Artificial
  Sequences of functional target portions for RNAi to inhibit influenza virus.
ggcaaatggaaatctaata

SEQ ID NO: 2209 - DNA, 19 bp, Artificial
  Sequences of functional target portions for RNAi to inhibit influenza virus.
aaatggaaatctaatagca

SEQ ID NO: 2210 - DNA, 19 bp, Artificial
  Sequences of functional target portions for RNAi to inhibit influenza virus.
tggaaatctaatagcacca

SEQ ID NO: 2211 - DNA, 19 bp, Artificial
  Sequences of functional target portions for RNAi to inhibit influenza virus.
tctaatagcaccaatgtat

SEQ ID NO: 2212 - DNA, 19 bp, Artificial
  Sequences of functional target portions for RNAi to inhibit influenza virus.
cgcactgagtagaggcttt

SEQ ID NO: 2213 - DNA, 19 bp, Artificial
  Sequences of functional target portions for RNAi to inhibit influenza virus.
gagtagaggctttgggtcc

SEQ ID NO: 2214 - DNA, 19 bp, Artificial
  Sequences of functional target portions for RNAi to inhibit influenza virus.
cctcaaacgcatcaatgca

SEQ ID NO: 2215 - DNA, 19 bp, Artificial
  Sequences of functional target portions for RNAi to inhibit influenza virus.
catcaatgcatgagtgtaa

SEQ ID NO: 2216 - DNA, 19 bp, Artificial
  Sequences of functional target portions for RNAi to inhibit influenza virus.
atgcatgagtgtaacacga

SEQ ID NO: 2217 - DNA, 19 bp, Artificial
  Sequences of functional target portions for RNAi to inhibit influenza virus.
agtgtaacacgaagtgtca

SEQ ID NO: 2218 - DNA, 19 bp, Artificial
  Sequences of functional target portions for RNAi to inhibit influenza virus.
tgtaacacgaagtgtcaaa

SEQ ID NO: 2219 - DNA, 19 bp, Artificial
  Sequences of functional target portions for RNAi to inhibit influenza virus.
cagaatatacacccagtca

SEQ ID NO: 2220 - DNA, 19 bp, Artificial
  Sequences of functional target portions for RNAi to inhibit influenza virus.
gaatatacacccagtcaca

SEQ ID NO: 2221 - DNA, 19 bp, Artificial
  Sequences of functional target portions for RNAi to inhibit influenza virus.
atatacacccagtcacaat

SEQ ID NO: 2222 - DNA, 19 bp, Artificial
  Sequences of functional target portions for RNAi to inhibit influenza virus.
acaataggagagtgcccaa

SEQ ID NO: 2223 - DNA, 19 bp, Artificial
  Sequences of functional target portions for RNAi to inhibit influenza virus.
atacgtcaggagtgccaaa

SEQ ID NO: 2224 - DNA, 19 bp, Artificial
  Sequences of functional target portions for RNAi to inhibit influenza virus.
gccaaattgaggatggtta

SEQ ID NO: 2225 - DNA, 19 bp, Artificial
  Sequences of functional target portions for RNAi to inhibit influenza virus.
ccaaattgaggatggttac

SEQ ID NO: 2226 - DNA, 19 bp, Artificial
  Sequences of functional target portions for RNAi to inhibit influenza virus.
gaggatggttacaggacta

SEQ ID NO: 2227 - DNA, 19 bp, Artificial
  Sequences of functional target portions for RNAi to inhibit influenza virus.
ggttacaggactaaggaac

SEQ ID NO: 2228 - DNA, 19 bp, Artificial
  Sequences of functional target portions for RNAi to inhibit influenza virus.
gttacaggactaaggaaca

SEQ ID NO: 2229 - DNA, 19 bp, Artificial
  Sequences of functional target portions for RNAi to inhibit influenza virus.
cattcaatccagaggtcta

SEQ ID NO: 2230 - DNA, 19 bp, Artificial
  Sequences of functional target portions for RNAi to inhibit influenza virus.
aggtctatttggagccatt

SEQ ID NO: 2231 - DNA, 19 bp, Artificial
  Sequences of functional target portions for RNAi to inhibit influenza virus.
gggatggactggaatgata

SEQ ID NO: 2232 - DNA, 19 bp, Artificial
  Sequences of functional target portions for RNAi to inhibit influenza virus.
ctggaatgatagatggatg

SEQ ID NO: 2233 - DNA, 19 bp, Artificial
  Sequences of functional target portions for RNAi to inhibit influenza virus.
aatgatagatggatggtat

SEQ ID NO: 2234 - DNA, 19 bp, Artificial
  Sequences of functional target portions for RNAi to inhibit influenza virus.
atagatggatggtatggtt

SEQ ID NO: 2235 - DNA, 19 bp, Artificial
  Sequences of functional target portions for RNAi to inhibit influenza virus.
tagatggatggtatggtta

SEQ ID NO: 2236 - DNA, 19 bp, Artificial
  Sequences of functional target portions for RNAi to inhibit influenza virus.
agatggatggtatggttat

SEQ ID NO: 2237 - DNA, 19 bp, Artificial
  Sequences of functional target portions for RNAi to inhibit influenza virus.
tggttatcatcatcagaat

SEQ ID NO: 2238 - DNA, 19 bp, Artificial
  Sequences of functional target portions for RNAi to inhibit influenza virus.
gttatcatcatcagaatga

SEQ ID NO: 2239 - DNA, 19 bp, Artificial
  Sequences of functional target portions for RNAi to inhibit influenza virus.
catcagaatgaacagggat

SEQ ID NO: 2240 - DNA, 19 bp, Artificial
  Sequences of functional target portions for RNAi to inhibit influenza virus.
atgaacagggatcaggcta

SEQ ID NO: 2241 - DNA, 19 bp, Artificial
  Sequences of functional target portions for RNAi to inhibit influenza virus.
tgaacagggatcaggctat

SEQ ID NO: 2242 - DNA, 19 bp, Artificial
  Sequences of functional target portions for RNAi to inhibit influenza virus.
caggctatgcagcggatca

SEQ ID NO: 2243 - DNA, 19 bp, Artificial
  Sequences of functional target portions for RNAi to inhibit influenza virus.
gctatgcagcggatcaaaa

SEQ ID NO: 2244 - DNA, 19 bp, Artificial
  Sequences of functional target portions for RNAi to inhibit influenza virus.
ggatcaaaaaagcacacaa

SEQ ID NO: 2245 - DNA, 19 bp, Artificial
  Sequences of functional target portions for RNAi to inhibit influenza virus.
gatcaaaaaagcacacaaa

SEQ ID NO: 2246 - DNA, 19 bp, Artificial
  Sequences of functional target portions for RNAi to inhibit influenza virus.
tcaaaaaagcacacaaaat

SEQ ID NO: 2247 - DNA, 19 bp, Artificial
  Sequences of functional target portions for RNAi to inhibit influenza virus.
caaaaaagcacacaaaatg

SEQ ID NO: 2248 - DNA, 19 bp, Artificial
  Sequences of functional target portions for RNAi to inhibit influenza virus.
gcacacaaaatgccattaa

SEQ ID NO: 2249 - DNA, 19 bp, Artificial
  Sequences of functional target portions for RNAi to inhibit influenza virus.
gccattaacgggattacaa

SEQ ID NO: 2250 - DNA, 19 bp, Artificial
  Sequences of functional target portions for RNAi to inhibit influenza virus.
ccattaacgggattacaaa

SEQ ID NO: 2251 - DNA, 19 bp, Artificial
  Sequences of functional target portions for RNAi to inhibit influenza virus.
gggattacaaacaaggtga

SEQ ID NO: 2252 - DNA, 19 bp, Artificial
  Sequences of functional target portions for RNAi to inhibit influenza virus.
ggattacaaacaaggtgaa

SEQ ID NO: 2253 - DNA, 19 bp, Artificial
  Sequences of functional target portions for RNAi to inhibit influenza virus.
ttacaaacaaggtgaacac

SEQ ID NO: 2254 - DNA, 19 bp, Artificial
  Sequences of functional target portions for RNAi to inhibit influenza virus.
caaacaaggtgaacactgt

SEQ ID NO: 2255 - DNA, 19 bp, Artificial
  Sequences of functional target portions for RNAi to inhibit influenza virus.
tgaacactgttatcgagaa

SEQ ID NO: 2256 - DNA, 19 bp, Artificial
  Sequences of functional target portions for RNAi to inhibit influenza virus.
gaacactgttatcgagaaa

SEQ ID NO: 2257 - DNA, 19 bp, Artificial
  Sequences of functional target portions for RNAi to inhibit influenza virus.
acactgttatcgagaaaat

SEQ ID NO: 2258 - DNA, 19 bp, Artificial
  Sequences of functional target portions for RNAi to inhibit influenza virus.
gagaaaatgaacattcaat

SEQ ID NO: 2259 - DNA, 19 bp, Artificial
  Sequences of functional target portions for RNAi to inhibit influenza virus.
agaaaatgaacattcaatt

SEQ ID NO: 2260 - DNA, 19 bp, Artificial
  Sequences of functional target portions for RNAi to inhibit influenza virus.
aattcacagctgtgggtaa

SEQ ID NO: 2261 - DNA, 19 bp, Artificial
  Sequences of functional target portions for RNAi to inhibit influenza virus.
attcacagctgtgggtaaa

SEQ ID NO: 2262 - DNA, 19 bp, Artificial
  Sequences of functional target portions for RNAi to inhibit influenza virus.
cagctgtgggtaaagaatt

SEQ ID NO: 2263 - DNA, 19 bp, Artificial
  Sequences of functional target portions for RNAi to inhibit influenza virus.
tgggtaaagaattcaacaa

SEQ ID NO: 2264 - DNA, 19 bp, Artificial
  Sequences of functional target portions for RNAi to inhibit influenza virus.
gggtaaagaattcaacaaa

SEQ ID NO: 2265 - DNA, 19 bp, Artificial
  Sequences of functional target portions for RNAi to inhibit influenza virus.
ggtaaagaattcaacaaat

SEQ ID NO: 2266 - DNA, 19 bp, Artificial
  Sequences of functional target portions for RNAi to inhibit influenza virus.
gtaaagaattcaacaaatt

SEQ ID NO: 2267 - DNA, 19 bp, Artificial
  Sequences of functional target portions for RNAi to inhibit influenza virus.
taaagaattcaacaaatta

SEQ ID NO: 2268 - DNA, 19 bp, Artificial
  Sequences of functional target portions for RNAi to inhibit influenza virus.
gaattcaacaaattagaaa

SEQ ID NO: 2269 - DNA, 19 bp, Artificial
  Sequences of functional target portions for RNAi to inhibit influenza virus.
aattcaacaaattagaaaa

SEQ ID NO: 2270 - DNA, 19 bp, Artificial
  Sequences of functional target portions for RNAi to inhibit influenza virus.
attcaacaaattagaaaaa

SEQ ID NO: 2271 - DNA, 19 bp, Artificial
  Sequences of functional target portions for RNAi to inhibit influenza virus.
tcaacaaattagaaaaaag

SEQ ID NO: 2272 - DNA, 19 bp, Artificial
  Sequences of functional target portions for RNAi to inhibit influenza virus.
acaaattagaaaaaaggat

SEQ ID NO: 2273 - DNA, 19 bp, Artificial
  Sequences of functional target portions for RNAi to inhibit influenza virus.
ttagaaaaaaggatggaaa

SEQ ID NO: 2274 - DNA, 19 bp, Artificial
  Sequences of functional target portions for RNAi to inhibit influenza virus.
tagaaaaaaggatggaaaa

SEQ ID NO: 2275 - DNA, 19 bp, Artificial
  Sequences of functional target portions for RNAi to inhibit influenza virus.
agaaaaaaggatggaaaat

SEQ ID NO: 2276 - DNA, 19 bp, Artificial
  Sequences of functional target portions for RNAi to inhibit influenza virus.
gaaaaaaggatggaaaatt

SEQ ID NO: 2277 - DNA, 19 bp, Artificial
  Sequences of functional target portions for RNAi to inhibit influenza virus.
aaaaaaggatggaaaattt

SEQ ID NO: 2278 - DNA, 19 bp, Artificial
  Sequences of functional target portions for RNAi to inhibit influenza virus.
aaaaaggatggaaaattta

SEQ ID NO: 2279 - DNA, 19 bp, Artificial
  Sequences of functional target portions for RNAi to inhibit influenza virus.
ggatggaaaatttaaataa

SEQ ID NO: 2280 - DNA, 19 bp, Artificial
  Sequences of functional target portions for RNAi to inhibit influenza virus.
gatggaaaatttaaataaa

SEQ ID NO: 2281 - DNA, 19 bp, Artificial
  Sequences of functional target portions for RNAi to inhibit influenza virus.
atggaaaatttaaataaaa

SEQ ID NO: 2282 - DNA, 19 bp, Artificial
  Sequences of functional target portions for RNAi to inhibit influenza virus.
tggaaaatttaaataaaaa

SEQ ID NO: 2283 - DNA, 19 bp, Artificial
  Sequences of functional target portions for RNAi to inhibit influenza virus.
ggaaaatttaaataaaaaa

SEQ ID NO: 2284 - DNA, 19 bp, Artificial
  Sequences of functional target portions for RNAi to inhibit influenza virus.
aaatttaaataaaaaagtt

SEQ ID NO: 2285 - DNA, 19 bp, Artificial
  Sequences of functional target portions for RNAi to inhibit influenza virus.
taaataaaaaagttgatga

SEQ ID NO: 2286 - DNA, 19 bp, Artificial
  Sequences of functional target portions for RNAi to inhibit influenza virus.
aaataaaaaagttgatgat

SEQ ID NO: 2287 - DNA, 19 bp, Artificial
  Sequences of functional target portions for RNAi to inhibit influenza virus.
taaaaaagttgatgatgga

SEQ ID NO: 2288 - DNA, 19 bp, Artificial
  Sequences of functional target portions for RNAi to inhibit influenza virus.
aaaaagttgatgatggatt

SEQ ID NO: 2289 - DNA, 19 bp, Artificial
  Sequences of functional target portions for RNAi to inhibit influenza virus.
aaaagttgatgatggattt

SEQ ID NO: 2290 - DNA, 19 bp, Artificial
  Sequences of functional target portions for RNAi to inhibit influenza virus.
gatgatggatttctggaca

SEQ ID NO: 2291 - DNA, 19 bp, Artificial
  Sequences of functional target portions for RNAi to inhibit influenza virus.
atgatggatttctggacat

SEQ ID NO: 2292 - DNA, 19 bp, Artificial
  Sequences of functional target portions for RNAi to inhibit influenza virus.
ctggacatttggacatata

SEQ ID NO: 2293 - DNA, 19 bp, Artificial
  Sequences of functional target portions for RNAi to inhibit influenza virus.
ggacatttggacatataat

SEQ ID NO: 2294 - DNA, 19 bp, Artificial
  Sequences of functional target portions for RNAi to inhibit influenza virus.
ggacatataatgcagaatt

SEQ ID NO: 2295 - DNA, 19 bp, Artificial
  Sequences of functional target portions for RNAi to inhibit influenza virus.
gacatataatgcagaattg

SEQ ID NO: 2296 - DNA, 19 bp, Artificial
  Sequences of functional target portions for RNAi to inhibit influenza virus.
catataatgcagaattgtt

SEQ ID NO: 2297 - DNA, 19 bp, Artificial
  Sequences of functional target portions for RNAi to inhibit influenza virus.
atataatgcagaattgtta

SEQ ID NO: 2298 - DNA, 19 bp, Artificial
  Sequences of functional target portions for RNAi to inhibit influenza virus.
atgcagaattgttagttct

SEQ ID NO: 2299 - DNA, 19 bp, Artificial
  Sequences of functional target portions for RNAi to inhibit influenza virus.
cagaattgttagttctact

SEQ ID NO: 2300 - DNA, 19 bp, Artificial
  Sequences of functional target portions for RNAi to inhibit influenza virus.
attgttagttctactggaa

SEQ ID NO: 2301 - DNA, 19 bp, Artificial
  Sequences of functional target portions for RNAi to inhibit influenza virus.
tgttagttctactggaaaa

SEQ ID NO: 2302 - DNA, 19 bp, Artificial
  Sequences of functional target portions for RNAi to inhibit influenza virus.
aatgaaaggactctggatt

SEQ ID NO: 2303 - DNA, 19 bp, Artificial
  Sequences of functional target portions for RNAi to inhibit influenza virus.
atgaaaggactctggattt

SEQ ID NO: 2304 - DNA, 19 bp, Artificial
  Sequences of functional target portions for RNAi to inhibit influenza virus.
tggatttccatgactcaaa

SEQ ID NO: 2305 - DNA, 19 bp, Artificial
  Sequences of functional target portions for RNAi to inhibit influenza virus.
atgactcaaatgtgaagaa

SEQ ID NO: 2306 - DNA, 19 bp, Artificial
  Sequences of functional target portions for RNAi to inhibit influenza virus.
actcaaatgtgaagaatct

SEQ ID NO: 2307 - DNA, 19 bp, Artificial
  Sequences of functional target portions for RNAi to inhibit influenza virus.
atgtgaagaatctgtatga

SEQ ID NO: 2308 - DNA, 19 bp, Artificial
  Sequences of functional target portions for RNAi to inhibit influenza virus.
gtgaagaatctgtatgaga

SEQ ID NO: 2309 - DNA, 19 bp, Artificial
  Sequences of functional target portions for RNAi to inhibit influenza virus.
tgaagaatctgtatgagaa

SEQ ID NO: 2310 - DNA, 19 bp, Artificial
  Sequences of functional target portions for RNAi to inhibit influenza virus.
gaagaatctgtatgagaaa

SEQ ID NO: 2311 - DNA, 19 bp, Artificial
  Sequences of functional target portions for RNAi to inhibit influenza virus.
agaatctgtatgagaaagt

SEQ ID NO: 2312 - DNA, 19 bp, Artificial
  Sequences of functional target portions for RNAi to inhibit influenza virus.
aatctgtatgagaaagtaa

SEQ ID NO: 2313 - DNA, 19 bp, Artificial
  Sequences of functional target portions for RNAi to inhibit influenza virus.
atgagaaagtaaaaagcca

SEQ ID NO: 2314 - DNA, 19 bp, Artificial
  Sequences of functional target portions for RNAi to inhibit influenza virus.
tgagaaagtaaaaagccaa

SEQ ID NO: 2315 - DNA, 19 bp, Artificial
  Sequences of functional target portions for RNAi to inhibit influenza virus.
gagaaagtaaaaagccaat

SEQ ID NO: 2316 - DNA, 19 bp, Artificial
  Sequences of functional target portions for RNAi to inhibit influenza virus.
gaaagtaaaaagccaatta

SEQ ID NO: 2317 - DNA, 19 bp, Artificial
  Sequences of functional target portions for RNAi to inhibit influenza virus.
aagtaaaaagccaattaaa

SEQ ID NO: 2318 - DNA, 19 bp, Artificial
  Sequences of functional target portions for RNAi to inhibit influenza virus.
gtaaaaagccaattaaaga

SEQ ID NO: 2319 - DNA, 19 bp, Artificial
  Sequences of functional target portions for RNAi to inhibit influenza virus.
taaaaagccaattaaagaa

SEQ ID NO: 2320 - DNA, 19 bp, Artificial
  Sequences of functional target portions for RNAi to inhibit influenza virus.
aaagccaattaaagaataa

SEQ ID NO: 2321 - DNA, 19 bp, Artificial
  Sequences of functional target portions for RNAi to inhibit influenza virus.
caattaaagaataatgcca

SEQ ID NO: 2322 - DNA, 19 bp, Artificial
  Sequences of functional target portions for RNAi to inhibit influenza virus.
aattaaagaataatgccaa

SEQ ID NO: 2323 - DNA, 19 bp, Artificial
  Sequences of functional target portions for RNAi to inhibit influenza virus.
attaaagaataatgccaaa

SEQ ID NO: 2324 - DNA, 19 bp, Artificial
  Sequences of functional target portions for RNAi to inhibit influenza virus.
taaagaataatgccaaaga

SEQ ID NO: 2325 - DNA, 19 bp, Artificial
  Sequences of functional target portions for RNAi to inhibit influenza virus.
aaagaataatgccaaagaa

SEQ ID NO: 2326 - DNA, 19 bp, Artificial
  Sequences of functional target portions for RNAi to inhibit influenza virus.
aagaataatgccaaagaaa

SEQ ID NO: 2327 - DNA, 19 bp, Artificial
  Sequences of functional target portions for RNAi to inhibit influenza virus.
agaataatgccaaagaaat

SEQ ID NO: 2328 - DNA, 19 bp, Artificial
  Sequences of functional target portions for RNAi to inhibit influenza virus.
gaataatgccaaagaaatc

SEQ ID NO: 2329 - DNA, 19 bp, Artificial
  Sequences of functional target portions for RNAi to inhibit influenza virus.
atgccaaagaaatcggaaa

SEQ ID NO: 2330 - DNA, 19 bp, Artificial
  Sequences of functional target portions for RNAi to inhibit influenza virus.
tgccaaagaaatcggaaat

SEQ ID NO: 2331 - DNA, 19 bp, Artificial
  Sequences of functional target portions for RNAi to inhibit influenza virus.
caaagaaatcggaaatgga

SEQ ID NO: 2332 - DNA, 19 bp, Artificial
  Sequences of functional target portions for RNAi to inhibit influenza virus.
agaaatcggaaatggatgt

SEQ ID NO: 2333 - DNA, 19 bp, Artificial
  Sequences of functional target portions for RNAi to inhibit influenza virus.
ggaaatggatgttttgagt

SEQ ID NO: 2334 - DNA, 19 bp, Artificial
  Sequences of functional target portions for RNAi to inhibit influenza virus.
gttttgagttctaccacaa

SEQ ID NO: 2335 - DNA, 19 bp, Artificial
  Sequences of functional target portions for RNAi to inhibit influenza virus.
agttctaccacaagtgtga

SEQ ID NO: 2336 - DNA, 19 bp, Artificial
  Sequences of functional target portions for RNAi to inhibit influenza virus.
ctaccacaagtgtgacaat

SEQ ID NO: 2337 - DNA, 19 bp, Artificial
  Sequences of functional target portions for RNAi to inhibit influenza virus.
ccacaagtgtgacaatgaa

SEQ ID NO: 2338 - DNA, 19 bp, Artificial
  Sequences of functional target portions for RNAi to inhibit influenza virus.
tgacaatgaatgcatggaa

SEQ ID NO: 2339 - DNA, 19 bp, Artificial
  Sequences of functional target portions for RNAi to inhibit influenza virus.
gacaatgaatgcatggaaa

SEQ ID NO: 2340 - DNA, 19 bp, Artificial
  Sequences of functional target portions for RNAi to inhibit influenza virus.
acaatgaatgcatggaaag

SEQ ID NO: 2341 - DNA, 19 bp, Artificial
  Sequences of functional target portions for RNAi to inhibit influenza virus.
atgaatgcatggaaagtgt

SEQ ID NO: 2342 - DNA, 19 bp, Artificial
  Sequences of functional target portions for RNAi to inhibit influenza virus.
gaatgcatggaaagtgtaa

SEQ ID NO: 2343 - DNA, 19 bp, Artificial
  Sequences of functional target portions for RNAi to inhibit influenza virus.
atgcatggaaagtgtaaga

SEQ ID NO: 2344 - DNA, 19 bp, Artificial
  Sequences of functional target portions for RNAi to inhibit influenza virus.
gcatggaaagtgtaagaaa

SEQ ID NO: 2345 - DNA, 19 bp, Artificial
  Sequences of functional target portions for RNAi to inhibit influenza virus.
catggaaagtgtaagaaat

SEQ ID NO: 2346 - DNA, 19 bp, Artificial
  Sequences of functional target portions for RNAi to inhibit influenza virus.
atggaaagtgtaagaaatg

SEQ ID NO: 2347 - DNA, 19 bp, Artificial
  Sequences of functional target portions for RNAi to inhibit influenza virus.
aagtgtaagaaatgggact

SEQ ID NO: 2348 - DNA, 19 bp, Artificial
  Sequences of functional target portions for RNAi to inhibit influenza virus.
gtgtaagaaatgggactta

SEQ ID NO: 2349 - DNA, 19 bp, Artificial
  Sequences of functional target portions for RNAi to inhibit influenza virus.
tgtaagaaatgggacttat

SEQ ID NO: 2350 - DNA, 19 bp, Artificial
  Sequences of functional target portions for RNAi to inhibit influenza virus.
agaaatgggacttatgatt

SEQ ID NO: 2351 - DNA, 19 bp, Artificial
  Sequences of functional target portions for RNAi to inhibit influenza virus.
gaaatgggacttatgatta

SEQ ID NO: 2352 - DNA, 19 bp, Artificial
  Sequences of functional target portions for RNAi to inhibit influenza virus.
aaatgggacttatgattat

SEQ ID NO: 2353 - DNA, 19 bp, Artificial
  Sequences of functional target portions for RNAi to inhibit influenza virus.
ggacttatgattatcccaa

SEQ ID NO: 2354 - DNA, 19 bp, Artificial
  Sequences of functional target portions for RNAi to inhibit influenza virus.
gacttatgattatcccaaa

SEQ ID NO: 2355 - DNA, 19 bp, Artificial
  Sequences of functional target portions for RNAi to inhibit influenza virus.
acttatgattatcccaaat

SEQ ID NO: 2356 - DNA, 19 bp, Artificial
  Sequences of functional target portions for RNAi to inhibit influenza virus.
cttatgattatcccaaata

SEQ ID NO: 2357 - DNA, 19 bp, Artificial
  Sequences of functional target portions for RNAi to inhibit influenza virus.
tatgattatcccaaatatt

SEQ ID NO: 2358 - DNA, 19 bp, Artificial
  Sequences of functional target portions for RNAi to inhibit influenza virus.
ccaaatattcagaagagtc

SEQ ID NO: 2359 - DNA, 19 bp, Artificial
  Sequences of functional target portions for RNAi to inhibit influenza virus.
caaatattcagaagagtca

SEQ ID NO: 2360 - DNA, 19 bp, Artificial
  Sequences of functional target portions for RNAi to inhibit influenza virus.
aatattcagaagagtcaaa

SEQ ID NO: 2361 - DNA, 19 bp, Artificial
  Sequences of functional target portions for RNAi to inhibit influenza virus.
attcagaagagtcaaagtt

SEQ ID NO: 2362 - DNA, 19 bp, Artificial
  Sequences of functional target portions for RNAi to inhibit influenza virus.
tcagaagagtcaaagttga

SEQ ID NO: 2363 - DNA, 19 bp, Artificial
  Sequences of functional target portions for RNAi to inhibit influenza virus.
cagaagagtcaaagttgaa

SEQ ID NO: 2364 - DNA, 19 bp, Artificial
  Sequences of functional target portions for RNAi to inhibit influenza virus.
gaagagtcaaagttgaaca

SEQ ID NO: 2365 - DNA, 19 bp, Artificial
  Sequences of functional target portions for RNAi to inhibit influenza virus.
agtcaaagttgaacaggga

SEQ ID NO: 2366 - DNA, 19 bp, Artificial
  Sequences of functional target portions for RNAi to inhibit influenza virus.
tcaaagttgaacagggaaa

SEQ ID NO: 2367 - DNA, 19 bp, Artificial
  Sequences of functional target portions for RNAi to inhibit influenza virus.
caaagttgaacagggaaaa

SEQ ID NO: 2368 - DNA, 19 bp, Artificial
  Sequences of functional target portions for RNAi to inhibit influenza virus.
gggaaaaggtagatggagt

SEQ ID NO: 2369 - DNA, 19 bp, Artificial
  Sequences of functional target portions for RNAi to inhibit influenza virus.
aaaggtagatggagtgaaa

SEQ ID NO: 2370 - DNA, 19 bp, Artificial
  Sequences of functional target portions for RNAi to inhibit influenza virus.
aggtagatggagtgaaatt

SEQ ID NO: 2371 - DNA, 19 bp, Artificial
  Sequences of functional target portions for RNAi to inhibit influenza virus.
agatggagtgaaattggaa

SEQ ID NO: 2372 - DNA, 19 bp, Artificial
  Sequences of functional target portions for RNAi to inhibit influenza virus.
ggagtgaaattggaatcaa

SEQ ID NO: 2373 - DNA, 19 bp, Artificial
  Sequences of functional target portions for RNAi to inhibit influenza virus.
gagtgaaattggaatcaat

SEQ ID NO: 2374 - DNA, 19 bp, Artificial
  Sequences of functional target portions for RNAi to inhibit influenza virus.
gcaatcagtttctggatgt

SEQ ID NO: 2375 - DNA, 19 bp, Artificial
  Sequences of functional target portions for RNAi to inhibit influenza virus.
tctaatggatctttgcagt

SEQ ID NO: 2376 - DNA, 19 bp, Artificial
  Sequences of functional target portions for RNAi to inhibit influenza virus.
ggatctttgcagtgcagaa

SEQ ID NO: 2377 - DNA, 19 bp, Artificial
  Sequences of functional target portions for RNAi to inhibit influenza virus.
tctttgcagtgcagaatat

SEQ ID NO: 2378 - DNA, 19 bp, Artificial
  Sequences of functional target portions for RNAi to inhibit influenza virus.
gtgcagaatatgcatctga

SEQ ID NO: 2379 - DNA, 19 bp, Artificial
  Sequences of functional target portions for RNAi to inhibit influenza virus.
gcagaatatgcatctgaga

SEQ ID NO: 2380 - DNA, 19 bp, Artificial
  Sequences of functional target portions for RNAi to inhibit        influenza virus.
cagaatatgcatctgagat

SEQ ID NO: 2381 - DNA, 19 bp, Artificial
  Sequences of functional target portions for RNAi to inhibit        influenza virus.
agaatatgcatctgagatt

SEQ ID NO: 2382 - DNA, 19 bp, Artificial
  Sequences of functional target portions for RNAi to inhibit        influenza virus.
gaatatgcatctgagatta

SEQ ID NO: 2383 - DNA, 19 bp, Artificial
  Sequences of functional target portions for RNAi to inhibit        influenza virus.
gcatctgagattagaattt

SEQ ID NO: 2384 - DNA, 19 bp, Artificial
  Sequences of functional target portions for RNAi to inhibit        influenza virus.
tgagattagaatttcagaa

SEQ ID NO: 2385 - DNA, 19 bp, Artificial
  Sequences of functional target portions for RNAi to inhibit        influenza virus.
gagattagaatttcagaaa

SEQ ID NO: 2386 - DNA, 19 bp, Artificial
  Sequences of functional target portions for RNAi to inhibit        influenza virus.
agattagaatttcagaaat

SEQ ID NO: 2387 - DNA, 19 bp, Artificial
  Sequences of functional target portions for RNAi to inhibit        influenza virus.
gattagaatttcagaaata

SEQ ID NO: 2388 - DNA, 19 bp, Artificial
  Sequences of functional target portions for RNAi to inhibit        influenza virus.
atttcagaaatatgaggaa

SEQ ID NO: 2389 - DNA, 19 bp, Artificial
  Sequences of functional target portions for RNAi to inhibit        influenza virus.
tttcagaaatatgaggaaa

SEQ ID NO: 2390 - DNA, 19 bp, Artificial
  Sequences of functional target portions for RNAi to inhibit        influenza virus.
ttcagaaatatgaggaaaa

SEQ ID NO: 2391 - DNA, 19 bp, Artificial
  Sequences of functional target portions for RNAi to inhibit        influenza virus.
tcagaaatatgaggaaaaa

SEQ ID NO: 2392 - DNA, 19 bp, Artificial
  Sequences of functional target portions for RNAi to inhibit        influenza virus.
agaaatatgaggaaaaaca

SEQ ID NO: 2393 - DNA, 19 bp, Artificial
  Sequences of functional target portions for RNAi to inhibit        influenza virus.
gggtttaaaatgaatccaa

SEQ ID NO: 2394 - DNA, 19 bp, Artificial
  Sequences of functional target portions for RNAi to inhibit        influenza virus.
ggtttaaaatgaatccaaa

SEQ ID NO: 2395 - DNA, 19 bp, Artificial
  Sequences of functional target portions for RNAi to inhibit        influenza virus.
gtttaaaatgaatccaaat

SEQ ID NO: 2396 - DNA, 19 bp, Artificial
  Sequences of functional target portions for RNAi to inhibit        influenza virus.
aaatgaatccaaatcagaa

SEQ ID NO: 2397 - DNA, 19 bp, Artificial
  Sequences of functional target portions for RNAi to inhibit        influenza virus.
aatgaatccaaatcagaaa

SEQ ID NO: 2398 - DNA, 19 bp, Artificial
  Sequences of functional target portions for RNAi to inhibit        influenza virus.
aatccaaatcagaaaataa

SEQ ID NO: 2399 - DNA, 19 bp, Artificial
  Sequences of functional target portions for RNAi to inhibit        influenza virus.
ccaaatcagaaaataacaa

SEQ ID NO: 2400 - DNA, 19 bp, Artificial
  Sequences of functional target portions for RNAi to inhibit        influenza virus.
aataacaaccattggatca

SEQ ID NO: 2401 - DNA, 19 bp, Artificial
  Sequences of functional target portions for RNAi to inhibit        influenza virus.
ggatcaatctgtctggtag

SEQ ID NO: 2402 - DNA, 19 bp, Artificial
  Sequences of functional target portions for RNAi to inhibit        influenza virus.
gatcaatctgtctggtagt

SEQ ID NO: 2403 - DNA, 19 bp, Artificial
  Sequences of functional target portions for RNAi to inhibit        influenza virus.
ctgtctggtagtcggacta

SEQ ID NO: 2404 - DNA, 19 bp, Artificial
  Sequences of functional target portions for RNAi to inhibit        influenza virus.
cggactaattagcctaata

SEQ ID NO: 2405 - DNA, 19 bp, Artificial
  Sequences of functional target portions for RNAi to inhibit        influenza virus.
ggactaattagcctaatat

SEQ ID NO: 2406 - DNA, 19 bp, Artificial
  Sequences of functional target portions for RNAi to inhibit        influenza virus.
taatattgcaaatagggaa

SEQ ID NO: 2407 - DNA, 19 bp, Artificial
  Sequences of functional target portions for RNAi to inhibit        influenza virus.
aatattgcaaatagggaat

SEQ ID NO: 2408 - DNA, 19 bp, Artificial
  Sequences of functional target portions for RNAi to inhibit        influenza virus.
ttgcaaatagggaatataa

SEQ ID NO: 2409 - DNA, 19 bp, Artificial
  Sequences of functional target portions for RNAi to inhibit        influenza virus.
tgcaaatagggaatataat

SEQ ID NO: 2410 - DNA, 19 bp, Artificial
  Sequences of functional target portions for RNAi to inhibit        influenza virus.
gcaaatagggaatataatc

SEQ ID NO: 2411 - DNA, 19 bp, Artificial
  Sequences of functional target portions for RNAi to inhibit        influenza virus.
caaatagggaatataatct

SEQ ID NO: 2412 - DNA, 19 bp, Artificial
  Sequences of functional target portions for RNAi to inhibit        influenza virus.
agggaatataatctcaata

SEQ ID NO: 2413 - DNA, 19 bp, Artificial
  Sequences of functional target portions for RNAi to inhibit        influenza virus.
gggaatataatctcaatat

SEQ ID NO: 2414 - DNA, 19 bp, Artificial
  Sequences of functional target portions for RNAi to inhibit        influenza virus.
ggaatataatctcaatatg

SEQ ID NO: 2415 - DNA, 19 bp, Artificial
  Sequences of functional target portions for RNAi to inhibit        influenza virus.
aatataatctcaatatgga

SEQ ID NO: 2416 - DNA, 19 bp, Artificial
  Sequences of functional target portions for RNAi to inhibit        influenza virus.
tataatctcaatatggatt

SEQ ID NO: 2417 - DNA, 19 bp, Artificial
  Sequences of functional target portions for RNAi to inhibit        influenza virus.
tcaatatggattagccatt

SEQ ID NO: 2418 - DNA, 19 bp, Artificial
  Sequences of functional target portions for RNAi to inhibit        influenza virus.
gattagccattcaattcaa

SEQ ID NO: 2419 - DNA, 19 bp, Artificial
  Sequences of functional target portions for RNAi to inhibit        influenza virus.
cattcaattcaaactggaa

SEQ ID NO: 2420 - DNA, 19 bp, Artificial
  Sequences of functional target portions for RNAi to inhibit        influenza virus.
aattcaaactggaagtcaa

SEQ ID NO: 2421 - DNA, 19 bp, Artificial
  Sequences of functional target portions for RNAi to inhibit        influenza virus.
attcaaactggaagtcaaa

SEQ ID NO: 2422 - DNA, 19 bp, Artificial
  Sequences of functional target portions for RNAi to inhibit        influenza virus.
agtcaaaaccatactggaa

SEQ ID NO: 2423 - DNA, 19 bp, Artificial
  Sequences of functional target portions for RNAi to inhibit        influenza virus.
tcaaaaccatactggaata

SEQ ID NO: 2424 - DNA, 19 bp, Artificial
  Sequences of functional target portions for RNAi to inhibit        influenza virus.
actggaatatgcaaccaaa

SEQ ID NO: 2425 - DNA, 19 bp, Artificial
  Sequences of functional target portions for RNAi to inhibit        influenza virus.
caaaacatcattacctata

SEQ ID NO: 2426 - DNA, 19 bp, Artificial
  Sequences of functional target portions for RNAi to inhibit        influenza virus.
aaacatcattacctataaa

SEQ ID NO: 2427 - DNA, 19 bp, Artificial
  Sequences of functional target portions for RNAi to inhibit        influenza virus.
catcattacctataaaaat

SEQ ID NO: 2428 - DNA, 19 bp, Artificial
  Sequences of functional target portions for RNAi to inhibit        influenza virus.
atcattacctataaaaata

SEQ ID NO: 2429 - DNA, 19 bp, Artificial
  Sequences of functional target portions for RNAi to inhibit        influenza virus.
aaaaatagcacctgggtaa

SEQ ID NO: 2430 - DNA, 19 bp, Artificial
  Sequences of functional target portions for RNAi to inhibit        influenza virus.
gcacctgggtaaaggacac

SEQ ID NO: 2431 - DNA, 19 bp, Artificial
  Sequences of functional target portions for RNAi to inhibit        influenza virus.
gggtaaaggacacaacttc

SEQ ID NO: 2432 - DNA, 19 bp, Artificial
  Sequences of functional target portions for RNAi to inhibit        influenza virus.
ggtaaaggacacaacttca

SEQ ID NO: 2433 - DNA, 19 bp, Artificial
  Sequences of functional target portions for RNAi to inhibit        influenza virus.
ggacacaacttcagtgata

SEQ ID NO: 2434 - DNA, 19 bp, Artificial
  Sequences of functional target portions for RNAi to inhibit        influenza virus.
acacaacttcagtgatatt

SEQ ID NO: 2435 - DNA, 19 bp, Artificial
  Sequences of functional target portions for RNAi to inhibit        influenza virus.
acaacttcagtgatattaa

SEQ ID NO: 2436 - DNA, 19 bp, Artificial
  Sequences of functional target portions for RNAi to inhibit        influenza virus.
cagtgatattaaccggcaa

SEQ ID NO: 2437 - DNA, 19 bp, Artificial
  Sequences of functional target portions for RNAi to inhibit        influenza virus.
agtgatattaaccggcaat

SEQ ID NO: 2438 - DNA, 19 bp, Artificial
  Sequences of functional target portions for RNAi to inhibit        influenza virus.
gatattaaccggcaattca

SEQ ID NO: 2439 - DNA, 19 bp, Artificial
  Sequences of functional target portions for RNAi to inhibit        influenza virus.
ggtgggctatatacagcaa

SEQ ID NO: 2440 - DNA, 19 bp, Artificial
  Sequences of functional target portions for RNAi to inhibit        influenza virus.
gctatatacagcaaagaca

SEQ ID NO: 2441 - DNA, 19 bp, Artificial
  Sequences of functional target portions for RNAi to inhibit        influenza virus.
ctatatacagcaaagacaa

SEQ ID NO: 2442 - DNA, 19 bp, Artificial
  Sequences of functional target portions for RNAi to inhibit        influenza virus.
tatatacagcaaagacaat

SEQ ID NO: 2443 - DNA, 19 bp, Artificial
  Sequences of functional target portions for RNAi to inhibit        influenza virus.
acagcaaagacaatagcat

SEQ ID NO: 2444 - DNA, 19 bp, Artificial
  Sequences of functional target portions for RNAi to inhibit        influenza virus.
cagcaaagacaatagcata

SEQ ID NO: 2445 - DNA, 19 bp, Artificial
  Sequences of functional target portions for RNAi to inhibit        influenza virus.
agcaaagacaatagcataa

SEQ ID NO: 2446 - DNA, 19 bp, Artificial
  Sequences of functional target portions for RNAi to inhibit        influenza virus.
agcaaagacaatagcataa

SEQ ID NO: 2447 - DNA, 19 bp, Artificial
  Sequences of functional target portions for RNAi to inhibit        influenza virus.
aaagacaatagcataagaa

SEQ ID NO: 2448 - DNA, 19 bp, Artificial
  Sequences of functional target portions for RNAi to inhibit        influenza virus.
aagacaatagcataagaat

SEQ ID NO: 2449 - DNA, 19 bp, Artificial
  Sequences of functional target portions for RNAi to inhibit        influenza virus.
agacaatagcataagaatt

SEQ ID NO: 2450 - DNA, 19 bp, Artificial
  Sequences of functional target portions for RNAi to inhibit        influenza virus.
gacaatagcataagaattg

SEQ ID NO: 2451 - DNA, 19 bp, Artificial
  Sequences of functional target portions for RNAi to inhibit        influenza virus.
gcataagaattggttccaa

SEQ ID NO: 2452 - DNA, 19 bp, Artificial
  Sequences of functional target portions for RNAi to inhibit        influenza virus.
cataagaattggttccaaa

SEQ ID NO: 2453 - DNA, 19 bp, Artificial
  Sequences of functional target portions for RNAi to inhibit        influenza virus.
aagaattggttccaaagga

SEQ ID NO: 2454 - DNA, 19 bp, Artificial
  Sequences of functional target portions for RNAi to inhibit        influenza virus.
gaattggttccaaaggaga

SEQ ID NO: 2455 - DNA, 19 bp, Artificial
  Sequences of functional target portions for RNAi to inhibit        influenza virus.
aggagacgtttttgtcata

SEQ ID NO: 2456 - DNA, 19 bp, Artificial
  Sequences of functional target portions for RNAi to inhibit        influenza virus.
ccaaggtgccttactgaat

SEQ ID NO: 2457 - DNA, 19 bp, Artificial
  Sequences of functional target portions for RNAi to inhibit        influenza virus.
gtgccttactgaatgacaa

SEQ ID NO: 2458 - DNA, 19 bp, Artificial
  Sequences of functional target portions for RNAi to inhibit        influenza virus.
ctgaatgacaagcattcaa

SEQ ID NO: 2459 - DNA, 19 bp, Artificial
  Sequences of functional target portions for RNAi to inhibit        influenza virus.
tgaatgacaagcattcaaa

SEQ ID NO: 2460 - DNA, 19 bp, Artificial
  Sequences of functional target portions for RNAi to inhibit        influenza virus.
cattcaaatgggactgtta

SEQ ID NO: 2461 - DNA, 19 bp, Artificial
  Sequences of functional target portions for RNAi to inhibit        influenza virus.
attcaaatgggactgttaa

SEQ ID NO: 2462 - DNA, 19 bp, Artificial
  Sequences of functional target portions for RNAi to inhibit        influenza virus.
caaatgggactgttaagga

SEQ ID NO: 2463 - DNA, 19 bp, Artificial
  Sequences of functional target portions for RNAi to inhibit        influenza virus.
gttaaggacagaagccctt

SEQ ID NO: 2464 - DNA, 19 bp, Artificial
  Sequences of functional target portions for RNAi to inhibit        influenza virus.
ccttatagggccttaatga

SEQ ID NO: 2465 - DNA, 19 bp, Artificial
  Sequences of functional target portions for RNAi to inhibit        influenza virus.
gagctgccctgtcggtgaa

SEQ ID NO: 2466 - DNA, 19 bp, Artificial
  Sequences of functional target portions for RNAi to inhibit        influenza virus.
ccgtacaattcaagatttg

SEQ ID NO: 2467 - DNA, 19 bp, Artificial
  Sequences of functional target portions for RNAi to inhibit        influenza virus.
gtacaattcaagatttgaa

SEQ ID NO: 2468 - DNA, 19 bp, Artificial
  Sequences of functional target portions for RNAi to inhibit        influenza virus.
tcggttgcttggtcagcaa

SEQ ID NO: 2469 - DNA, 19 bp, Artificial
  Sequences of functional target portions for RNAi to inhibit        influenza virus.
gtgcatgtcatgatggcat

SEQ ID NO: 2470 - DNA, 19 bp, Artificial
  Sequences of functional target portions for RNAi to inhibit        influenza virus.
ggcatgggctggctaacaa

SEQ ID NO: 2471 - DNA, 19 bp, Artificial
  Sequences of functional target portions for RNAi to inhibit        influenza virus.
ctggctaacaatcggaatt

SEQ ID NO: 2472 - DNA, 19 bp, Artificial
  Sequences of functional target portions for RNAi to inhibit        influenza virus.
gctaacaatcggaatttca

SEQ ID NO: 2473 - DNA, 19 bp, Artificial
  Sequences of functional target portions for RNAi to inhibit        influenza virus.
aatcggaatttcaggtcca

SEQ ID NO: 2474 - DNA, 19 bp, Artificial
  Sequences of functional target portions for RNAi to inhibit        influenza virus.
cggaatttcaggtccagat

SEQ ID NO: 2475 - DNA, 19 bp, Artificial
  Sequences of functional target portions for RNAi to inhibit        influenza virus.
ggaatttcaggtccagata

SEQ ID NO: 2476 - DNA, 19 bp, Artificial
  Sequences of functional target portions for RNAi to inhibit        influenza virus.
gaatttcaggtccagataa

SEQ ID NO: 2477 - DNA, 19 bp, Artificial
  Sequences of functional target portions for RNAi to inhibit        influenza virus.
aatttcaggtccagataat

SEQ ID NO: 2478 - DNA, 19 bp, Artificial
  Sequences of functional target portions for RNAi to inhibit        influenza virus.
agataatggagcagtggct

SEQ ID NO: 2479 - DNA, 19 bp, Artificial
  Sequences of functional target portions for RNAi to inhibit        influenza virus.
tggagcagtggctgtatta

SEQ ID NO: 2480 - DNA, 19 bp, Artificial
  Sequences of functional target portions for RNAi to inhibit        influenza virus.
gagcagtggctgtattaaa

SEQ ID NO: 2481 - DNA, 19 bp, Artificial
  Sequences of functional target portions for RNAi to inhibit        influenza virus.
attaaaatacaacggcata

SEQ ID NO: 2482 - DNA, 19 bp, Artificial
  Sequences of functional target portions for RNAi to inhibit        influenza virus.
aaatacaacggcataataa

SEQ ID NO: 2483 - DNA, 19 bp, Artificial
  Sequences of functional target portions for RNAi to inhibit        influenza virus.
cggcataataactgaaacc

SEQ ID NO: 2484 - DNA, 19 bp, Artificial
  Sequences of functional target portions for RNAi to inhibit        influenza virus.
gcataataactgaaaccat

SEQ ID NO: 2485 - DNA, 19 bp, Artificial
  Sequences of functional target portions for RNAi to inhibit        influenza virus.
cataataactgaaaccata

SEQ ID NO: 2486 - DNA, 19 bp, Artificial
  Sequences of functional target portions for RNAi to inhibit        influenza virus.
ataataactgaaaccataa

SEQ ID NO: 2487 - DNA, 19 bp, Artificial
  Sequences of functional target portions for RNAi to inhibit        influenza virus.
ccataaaaagttggaggaa

SEQ ID NO: 2488 - DNA, 19 bp, Artificial
  Sequences of functional target portions for RNAi to inhibit        influenza virus.
cataaaaagttggaggaag

SEQ ID NO: 2489 - DNA, 19 bp, Artificial
  Sequences of functional target portions for RNAi to inhibit        influenza virus.
ataaaaagttggaggaaga

SEQ ID NO: 2490 - DNA, 19 bp, Artificial
  Sequences of functional target portions for RNAi to inhibit        influenza virus.
aaaagttggaggaagaaaa

SEQ ID NO: 2491 - DNA, 19 bp, Artificial
  Sequences of functional target portions for RNAi to inhibit        influenza virus.
agttggaggaagaaaatat

SEQ ID NO: 2492 - DNA, 19 bp, Artificial
  Sequences of functional target portions for RNAi to inhibit        influenza virus.
ggaagaaaatattgaggac

SEQ ID NO: 2493 - DNA, 19 bp, Artificial
  Sequences of functional target portions for RNAi to inhibit        influenza virus.
aagaaaatattgaggacac

SEQ ID NO: 2494 - DNA, 19 bp, Artificial
  Sequences of functional target portions for RNAi to inhibit        influenza virus.
ggacacaagagtctgaatg

SEQ ID NO: 2495 - DNA, 19 bp, Artificial
  Sequences of functional target portions for RNAi to inhibit        influenza virus.
tctgaatgtgcctgtgtaa

SEQ ID NO: 2496 - DNA, 19 bp, Artificial
  Sequences of functional target portions for RNAi to inhibit        influenza virus.
ctgaatgtgcctgtgtaaa

SEQ ID NO: 2497 - DNA, 19 bp, Artificial
  Sequences of functional target portions for RNAi to inhibit        influenza virus.
tgaatgtgcctgtgtaaat

SEQ ID NO: 2498 - DNA, 19 bp, Artificial
  Sequences of functional target portions for RNAi to inhibit        influenza virus.
ctgtgtaaatggttcatgt

SEQ ID NO: 2499 - DNA, 19 bp, Artificial
  Sequences of functional target portions for RNAi to inhibit        influenza virus.
gtgtaaatggttcatgttt

SEQ ID NO: 2500 - DNA, 19 bp, Artificial
  Sequences of functional target portions for RNAi to inhibit        influenza virus.
tgtaaatggttcatgtttt

SEQ ID NO: 2501 - DNA, 19 bp, Artificial
  Sequences of functional target portions for RNAi to inhibit        influenza virus.
gtaaatggttcatgtttta

SEQ ID NO: 2502 - DNA, 19 bp, Artificial
  Sequences of functional target portions for RNAi to inhibit        influenza virus.
ggttcatgttttactataa

SEQ ID NO: 2503 - DNA, 19 bp, Artificial
  Sequences of functional target portions for RNAi to inhibit        influenza virus.
tgactgatggcccgagtga

SEQ ID NO: 2504 - DNA, 19 bp, Artificial
  Sequences of functional target portions for RNAi to inhibit        influenza virus.
actgatggcccgagtgatg

SEQ ID NO: 2505 - DNA, 19 bp, Artificial
  Sequences of functional target portions for RNAi to inhibit        influenza virus.
gggctggcctcgtacaaaa

SEQ ID NO: 2506 - DNA, 19 bp, Artificial
  Sequences of functional target portions for RNAi to inhibit        influenza virus.
ggggaaggttactaaatca

SEQ ID NO: 2507 - DNA, 19 bp, Artificial
  Sequences of functional target portions for RNAi to inhibit        influenza virus.
gggaaggttactaaatcaa

SEQ ID NO: 2508 - DNA, 19 bp, Artificial
  Sequences of functional target portions for RNAi to inhibit        influenza virus.
gaaggttactaaatcaata

SEQ ID NO: 2509 - DNA, 19 bp, Artificial
  Sequences of functional target portions for RNAi to inhibit        influenza virus.
gttactaaatcaatagagt

SEQ ID NO: 2510 - DNA, 19 bp, Artificial
  Sequences of functional target portions for RNAi to inhibit        influenza virus.
ttactaaatcaatagagtt

SEQ ID NO: 2511 - DNA, 19 bp, Artificial
  Sequences of functional target portions for RNAi to inhibit        influenza virus.
ctaaatcaatagagttgaa

SEQ ID NO: 2512 - DNA, 19 bp, Artificial
  Sequences of functional target portions for RNAi to inhibit        influenza virus.
cctgataccggcaaagtga

SEQ ID NO: 2513 - DNA, 19 bp, Artificial
  Sequences of functional target portions for RNAi to inhibit        influenza virus.
ccggcaaagtgatgtgtgt

SEQ ID NO: 2514 - DNA, 19 bp, Artificial
  Sequences of functional target portions for RNAi to inhibit        influenza virus.
ggcaaagtgatgtgtgtgt

SEQ ID NO: 2515 - DNA, 19 bp, Artificial
  Sequences of functional target portions for RNAi to inhibit        influenza virus.
atgtgtgtgtgcagagaca

SEQ ID NO: 2516 - DNA, 19 bp, Artificial
  Sequences of functional target portions for RNAi to inhibit        influenza virus.
gtgcagagacaactggcat

SEQ ID NO: 2517 - DNA, 19 bp, Artificial
  Sequences of functional target portions for RNAi to inhibit        influenza virus.
agagacaactggcatggtt

SEQ ID NO: 2518 - DNA, 19 bp, Artificial
  Sequences of functional target portions for RNAi to inhibit        influenza virus.
aaacctggattatcaaata

SEQ ID NO: 2519 - DNA, 19 bp, Artificial
  Sequences of functional target portions for RNAi to inhibit        influenza virus.
tggattatcaaataggata

SEQ ID NO: 2520 - DNA, 19 bp, Artificial
  Sequences of functional target portions for RNAi to inhibit        influenza virus.
ggattatcaaataggatac

SEQ ID NO: 2521 - DNA, 19 bp, Artificial
  Sequences of functional target portions for RNAi to inhibit        influenza virus.
cagctgtggtccagtgtat

SEQ ID NO: 2522 - DNA, 19 bp, Artificial
  Sequences of functional target portions for RNAi to inhibit        influenza virus.
agtgtatgttgatggagca

SEQ ID NO: 2523 - DNA, 19 bp, Artificial
  Sequences of functional target portions for RNAi to inhibit        influenza virus.
gtatgttgatggagcaaac

SEQ ID NO: 2524 - DNA, 19 bp, Artificial
  Sequences of functional target portions for RNAi to inhibit        influenza virus.
tgatggagcaaacggagta

SEQ ID NO: 2525 - DNA, 19 bp, Artificial
  Sequences of functional target portions for RNAi to inhibit        influenza virus.
gcaaacggagtaaagggat

SEQ ID NO: 2526 - DNA, 19 bp, Artificial
  Sequences of functional target portions for RNAi to inhibit        influenza virus.
caaacggagtaaagggatt

SEQ ID NO: 2527 - DNA, 19 bp, Artificial
  Sequences of functional target portions for RNAi to inhibit        influenza virus.
gagtaaagggattttcata

SEQ ID NO: 2528 - DNA, 19 bp, Artificial
  Sequences of functional target portions for RNAi to inhibit        influenza virus.
agtaaagggattttcatat

SEQ ID NO: 2529 - DNA, 19 bp, Artificial
  Sequences of functional target portions for RNAi to inhibit        influenza virus.
gtaaagggattttcatata

SEQ ID NO: 2530 - DNA, 19 bp, Artificial
  Sequences of functional target portions for RNAi to inhibit        influenza virus.
tttcatataggtatggtaa

SEQ ID NO: 2531 - DNA, 19 bp, Artificial
  Sequences of functional target portions for RNAi to inhibit        influenza virus.
tcatataggtatggtaatg

SEQ ID NO: 2532 - DNA, 19 bp, Artificial
  Sequences of functional target portions for RNAi to inhibit        influenza virus.
tggtaatggtgtttggata

SEQ ID NO: 2533 - DNA, 19 bp, Artificial
  Sequences of functional target portions for RNAi to inhibit        influenza virus.
ggtaatggtgtttggatag

SEQ ID NO: 2534 - DNA, 19 bp, Artificial
  Sequences of functional target portions for RNAi to inhibit        influenza virus.
aatggtgtttggataggaa

SEQ ID NO: 2535 - DNA, 19 bp, Artificial
  Sequences of functional target portions for RNAi to inhibit        influenza virus.
tggataggaaggaccaaaa

SEQ ID NO: 2536 - DNA, 19 bp, Artificial
  Sequences of functional target portions for RNAi to inhibit        influenza virus.
ggaaggaccaaaagtcaca

SEQ ID NO: 2537 - DNA, 19 bp, Artificial
  Sequences of functional target portions for RNAi to inhibit        influenza virus.
agtcacagttccagacatg

SEQ ID NO: 2538 - DNA, 19 bp, Artificial
  Sequences of functional target portions for RNAi to inhibit        influenza virus.
cagacatgggtttgagatg

SEQ ID NO: 2539 - DNA, 19 bp, Artificial
  Sequences of functional target portions for RNAi to inhibit        influenza virus.
agacatgggtttgagatga

SEQ ID NO: 2540 - DNA, 19 bp, Artificial
  Sequences of functional target portions for RNAi to inhibit        influenza virus.
gacatgggtttgagatgat

SEQ ID NO: 2541 - DNA, 19 bp, Artificial
  Sequences of functional target portions for RNAi to inhibit        influenza virus.
ggtttgagatgatttggga

SEQ ID NO: 2542 - DNA, 19 bp, Artificial
  Sequences of functional target portions for RNAi to inhibit        influenza virus.
ggatcctaatggatggaca

SEQ ID NO: 2543 - DNA, 19 bp, Artificial
  Sequences of functional target portions for RNAi to inhibit        influenza virus.
cctaatggatggacagaga

SEQ ID NO: 2544 - DNA, 19 bp, Artificial
  Sequences of functional target portions for RNAi to inhibit        influenza virus.
atggatggacagagactga

SEQ ID NO: 2545 - DNA, 19 bp, Artificial
  Sequences of functional target portions for RNAi to inhibit        influenza virus.
ggatggacagagactgata

SEQ ID NO: 2546 - DNA, 19 bp, Artificial
  Sequences of functional target portions for RNAi to inhibit        influenza virus.
ggacagagactgatagtaa

SEQ ID NO: 2547 - DNA, 19 bp, Artificial
  Sequences of functional target portions for RNAi to inhibit        influenza virus.
gatagtaagttctctgtta

SEQ ID NO: 2548 - DNA, 19 bp, Artificial
  Sequences of functional target portions for RNAi to inhibit        influenza virus.
taggcaagatgttgtggca

SEQ ID NO: 2549 - DNA, 19 bp, Artificial
  Sequences of functional target portions for RNAi to inhibit        influenza virus.
ggcaagatgttgtggcaat

SEQ ID NO: 2550 - DNA, 19 bp, Artificial
  Sequences of functional target portions for RNAi to inhibit        influenza virus.
ggcaatgactgattggtca

SEQ ID NO: 2551 - DNA, 19 bp, Artificial
  Sequences of functional target portions for RNAi to inhibit        influenza virus.
actgattggtcagggtata

SEQ ID NO: 2552 - DNA, 19 bp, Artificial
  Sequences of functional target portions for RNAi to inhibit        influenza virus.
tggtcagggtatagcggaa

SEQ ID NO: 2553 - DNA, 19 bp, Artificial
  Sequences of functional target portions for RNAi to inhibit        influenza virus.
tagcggaagtttcgttcaa

SEQ ID NO: 2554 - DNA, 19 bp, Artificial
  Sequences of functional target portions for RNAi to inhibit        influenza virus.
gcggaagtttcgttcaaca

SEQ ID NO: 2555 - DNA, 19 bp, Artificial
  Sequences of functional target portions for RNAi to inhibit        influenza virus.
cggaagtttcgttcaacat

SEQ ID NO: 2556 - DNA, 19 bp, Artificial
  Sequences of functional target portions for RNAi to inhibit        influenza virus.
cgttcaacatcctgagcta

SEQ ID NO: 2557 - DNA, 19 bp, Artificial
  Sequences of functional target portions for RNAi to inhibit        influenza virus.
gctaacagggctagactgt

SEQ ID NO: 2558 - DNA, 19 bp, Artificial
  Sequences of functional target portions for RNAi to inhibit        influenza virus.
taacagggctagactgtat

SEQ ID NO: 2559 - DNA, 19 bp, Artificial
  Sequences of functional target portions for RNAi to inhibit        influenza virus.
tgtatgaggccgtgcttct

SEQ ID NO: 2560 - DNA, 19 bp, Artificial
  Sequences of functional target portions for RNAi to inhibit        influenza virus.
gtgcttctgggttgaatta

SEQ ID NO: 2561 - DNA, 19 bp, Artificial
  Sequences of functional target portions for RNAi to inhibit        influenza virus.
gcttctgggttgaattaat

SEQ ID NO: 2562 - DNA, 19 bp, Artificial
  Sequences of functional target portions for RNAi to inhibit        influenza virus.
aatcaggggacgacctaaa

SEQ ID NO: 2563 - DNA, 19 bp, Artificial
  Sequences of functional target portions for RNAi to inhibit        influenza virus.
gggacgacctaaagaaaaa

SEQ ID NO: 2564 - DNA, 19 bp, Artificial
  Sequences of functional target portions for RNAi to inhibit        influenza virus.
cgacctaaagaaaaaacaa

SEQ ID NO: 2565 - DNA, 19 bp, Artificial
  Sequences of functional target portions for RNAi to inhibit        influenza virus.
agaaaaaacaatctggact

SEQ ID NO: 2566 - DNA, 19 bp, Artificial
  Sequences of functional target portions for RNAi to inhibit        influenza virus.
gaaaaaacaatctggacta

SEQ ID NO: 2567 - DNA, 19 bp, Artificial
  Sequences of functional target portions for RNAi to inhibit        influenza virus.
tggactagtgcgagcagca

SEQ ID NO: 2568 - DNA, 19 bp, Artificial
  Sequences of functional target portions for RNAi to inhibit        influenza virus.
actagtgcgagcagcattt

SEQ ID NO: 2569 - DNA, 19 bp, Artificial
  Sequences of functional target portions for RNAi to inhibit        influenza virus.
tggcgtgaatagtgatact

SEQ ID NO: 2570 - DNA, 19 bp, Artificial
  Sequences of functional target portions for RNAi to inhibit        influenza virus.
cgtgaatagtgatactgta

SEQ ID NO: 2571 - DNA, 19 bp, Artificial
  Sequences of functional target portions for RNAi to inhibit        influenza virus.
gtgaatagtgatactgtag

SEQ ID NO: 2572 - DNA, 19 bp, Artificial
  Sequences of functional target portions for RNAi to inhibit        influenza virus.
gaatagtgatactgtagat

SEQ ID NO: 2573 - DNA, 19 bp, Artificial
  Sequences of functional target portions for RNAi to inhibit        influenza virus.
gtagattggtcttggccag

SEQ ID NO: 2574 - DNA, 19 bp, Artificial
  Sequences of functional target portions for RNAi to inhibit        influenza virus.
ctgagttgccattcagcat

SEQ ID NO: 2575 - DNA, 19 bp, Artificial
  Sequences of functional target portions for RNAi to inhibit        influenza virus.
cattcagcattgacaagta

SEQ ID NO: 2576 - DNA, 19 bp, Artificial
  Sequences of functional target portions for RNAi to inhibit        influenza virus.
tgacaagtagtctgttcaa

SEQ ID NO: 2577 - DNA, 19 bp, Artificial
  Sequences of functional target portions for RNAi to inhibit        influenza virus.
acaagtagtctgttcaaaa

SEQ ID NO: 2578 - DNA, 19 bp, Artificial
  Sequences of functional target portions for RNAi to inhibit        influenza virus.
caagtagtctgttcaaaaa

SEQ ID NO: 2579 - DNA, 19 bp, Artificial
  Sequences of functional target portions for RNAi to inhibit        influenza virus.
gccactgaaatcagagcat

SEQ ID NO: 2580 - DNA, 19 bp, Artificial
  Sequences of functional target portions for RNAi to inhibit        influenza virus.
tcagagcatccgtcggaaa

SEQ ID NO: 2581 - DNA, 19 bp, Artificial
  Sequences of functional target portions for RNAi to inhibit        influenza virus.
ggacgattctacatccaaa

SEQ ID NO: 2582 - DNA, 19 bp, Artificial
  Sequences of functional target portions for RNAi to inhibit        influenza virus.
cagcttaacaatagagaga

SEQ ID NO: 2583 - DNA, 19 bp, Artificial
  Sequences of functional target portions for RNAi to inhibit        influenza virus.
gcttaacaatagagagaat

SEQ ID NO: 2584 - DNA, 19 bp, Artificial
  Sequences of functional target portions for RNAi to inhibit        influenza virus.
gggaaagatcctaagaaaa

SEQ ID NO: 2585 - DNA, 19 bp, Artificial
  Sequences of functional target portions for RNAi to inhibit        influenza virus.
ggaaagatcctaagaaaac

SEQ ID NO: 2586 - DNA, 19 bp, Artificial
  Sequences of functional target portions for RNAi to inhibit        influenza virus.
tgagagaactcatccttta

SEQ ID NO: 2587 - DNA, 19 bp, Artificial
  Sequences of functional target portions for RNAi to inhibit        influenza virus.
cctttatgacaaagaagaa

SEQ ID NO: 2588 - DNA, 19 bp, Artificial
  Sequences of functional target portions for RNAi to inhibit        influenza virus.
ctttatgacaaagaagaaa

SEQ ID NO: 2589 - DNA, 19 bp, Artificial
  Sequences of functional target portions for RNAi to inhibit        influenza virus.
tttatgacaaagaagaaat

SEQ ID NO: 2590 - DNA, 19 bp, Artificial
  Sequences of functional target portions for RNAi to inhibit        influenza virus.
ttatgacaaagaagaaata

SEQ ID NO: 2591 - DNA, 19 bp, Artificial
  Sequences of functional target portions for RNAi to inhibit        influenza virus.
acaagaattgcttatgaaa

SEQ ID NO: 2592 - DNA, 19 bp, Artificial
  Sequences of functional target portions for RNAi to inhibit        influenza virus.
gaattgcttatgaaagaat

SEQ ID NO: 2593 - DNA, 19 bp, Artificial
  Sequences of functional target portions for RNAi to inhibit        influenza virus.
cttatgaaagaatgtgcaa

SEQ ID NO: 2594 - DNA, 19 bp, Artificial
  Sequences of functional target portions for RNAi to inhibit        influenza virus.
tatgaaagaatgtgcaaca

SEQ ID NO: 2595 - DNA, 19 bp, Artificial
  Sequences of functional target portions for RNAi to inhibit        influenza virus.
tgaaagaatgtgcaacatt

SEQ ID NO: 2596 - DNA, 19 bp, Artificial
  Sequences of functional target portions for RNAi to inhibit        influenza virus.
gaaagaatgtgcaacattc

SEQ ID NO: 2597 - DNA, 19 bp, Artificial
  Sequences of functional target portions for RNAi to inhibit        influenza virus.
aagcaatgatggatcaagt

SEQ ID NO: 2598 - DNA, 19 bp, Artificial
  Sequences of functional target portions for RNAi to inhibit        influenza virus.
gcaatgatggatcaagtga

SEQ ID NO: 2599 - DNA, 19 bp, Artificial
  Sequences of functional target portions for RNAi to inhibit        influenza virus.
tgatggatcaagtgagaga

SEQ ID NO: 2600 - DNA, 19 bp, Artificial
  Sequences of functional target portions for RNAi to inhibit        influenza virus.
atggatcaagtgagagaga

SEQ ID NO: 2601 - DNA, 19 bp, Artificial
  Sequences of functional target portions for RNAi to inhibit        influenza virus.
tttgaagatctaagagtat

SEQ ID NO: 2602 - DNA, 19 bp, Artificial
  Sequences of functional target portions for RNAi to inhibit        influenza virus.
ccactagaggagttcaaat

SEQ ID NO: 2603 - DNA, 19 bp, Artificial
  Sequences of functional target portions for RNAi to inhibit        influenza virus.
cactagaggagttcaaatt

SEQ ID NO: 2604 - DNA, 19 bp, Artificial
  Sequences of functional target portions for RNAi to inhibit        influenza virus.
gaggaaacaccaatcaaca

SEQ ID NO: 2605 - DNA, 19 bp, Artificial
  Sequences of functional target portions for RNAi to inhibit        influenza virus.
ggaaacaccaatcaacaga

SEQ ID NO: 2606 - DNA, 19 bp, Artificial
  Sequences of functional target portions for RNAi to inhibit        influenza virus.
gggccaaatcagcatacaa

SEQ ID NO: 2607 - DNA, 19 bp, Artificial
  Sequences of functional target portions for RNAi to inhibit        influenza virus.
caaccattatggcagcatt

SEQ ID NO: 2608 - DNA, 19 bp, Artificial
  Sequences of functional target portions for RNAi to inhibit        influenza virus.
ccattatggcagcattcaa

SEQ ID NO: 2609 - DNA, 19 bp, Artificial
  Sequences of functional target portions for RNAi to inhibit        influenza virus.
aggatgatggaaagtgcaa

SEQ ID NO: 2610 - DNA, 19 bp, Artificial
  Sequences of functional target portions for RNAi to inhibit        influenza virus.
gatgatggaaagtgcaaga

SEQ ID NO: 2611 - DNA, 19 bp, Artificial
  Sequences of functional target portions for RNAi to inhibit        influenza virus.
gagtaatgaaggatcttat

SEQ ID NO: 2612 - DNA, 19 bp, Artificial
  Sequences of functional target portions for RNAi to inhibit        influenza virus.
gtaatgaaggatcttattt

SEQ ID NO: 2613 - DNA, 19 bp, Artificial
  Sequences of functional target portions for RNAi to inhibit        influenza virus.
ggatcttatttcttcggag

SEQ ID NO: 2614 - DNA, 19 bp, Artificial
  Sequences of functional target portions for RNAi to inhibit        influenza virus.
gatcttatttcttcggaga

SEQ ID NO: 2615 - DNA, 19 bp, Artificial
  Sequences of functional target portions for RNAi to inhibit        influenza virus.
ggagtacgacaattaaaga

SEQ ID NO: 2616 - DNA, 19 bp, Artificial
  Sequences of functional target portions for RNAi to inhibit        influenza virus.
aggtcaattatattcaata

SEQ ID NO: 2617 - DNA, 19 bp, Artificial
  Sequences of functional target portions for RNAi to inhibit        influenza virus.
ggtcaattatattcaatat

SEQ ID NO: 2618 - DNA, 19 bp, Artificial
  Sequences of functional target portions for RNAi to inhibit        influenza virus.
caattatattcaatatgga

SEQ ID NO: 2619 - DNA, 19 bp, Artificial
  Sequences of functional target portions for RNAi to inhibit        influenza virus.
aattatattcaatatggaa

SEQ ID NO: 2620 - DNA, 19 bp, Artificial
  Sequences of functional target portions for RNAi to inhibit        influenza virus.
attatattcaatatggaaa

SEQ ID NO: 2621 - DNA, 19 bp, Artificial
  Sequences of functional target portions for RNAi to inhibit        influenza virus.
tattcaatatggaaagaat

SEQ ID NO: 2622 - DNA, 19 bp, Artificial
  Sequences of functional target portions for RNAi to inhibit        influenza virus.
attcaatatggaaagaata

SEQ ID NO: 2623 - DNA, 19 bp, Artificial
  Sequences of functional target portions for RNAi to inhibit        influenza virus.
ttcaatatggaaagaataa

SEQ ID NO: 2624 - DNA, 19 bp, Artificial
  Sequences of functional target portions for RNAi to inhibit        influenza virus.
tcaatatggaaagaataaa

SEQ ID NO: 2625 - DNA, 19 bp, Artificial
  Sequences of functional target portions for RNAi to inhibit        influenza virus.
caatatggaaagaataaaa

SEQ ID NO: 2626 - DNA, 19 bp, Artificial
  Sequences of functional target portions for RNAi to inhibit        influenza virus.
gaactaagaaatctaatgt

SEQ ID NO: 2627 - DNA, 19 bp, Artificial
  Sequences of functional target portions for RNAi to inhibit        influenza virus.
atgaaatggatgatggcaa

SEQ ID NO: 2628 - DNA, 19 bp, Artificial
  Sequences of functional target portions for RNAi to inhibit        influenza virus.
tgaaatggatgatggcaat

SEQ ID NO: 2629 - DNA, 19 bp, Artificial
  Sequences of functional target portions for RNAi to inhibit        influenza virus.
atggatgatggcaatgaaa

SEQ ID NO: 2630 - DNA, 19 bp, Artificial
  Sequences of functional target portions for RNAi to inhibit        influenza virus.
tggatgatggcaatgaaat

SEQ ID NO: 2631 - DNA, 19 bp, Artificial
  Sequences of functional target portions for RNAi to inhibit        influenza virus.
ggatgatggcaatgaaata

SEQ ID NO: 2632 - DNA, 19 bp, Artificial
  Sequences of functional target portions for RNAi to inhibit        influenza virus.
gatgatggcaatgaaatat

SEQ ID NO: 2633 - DNA, 19 bp, Artificial
  Sequences of functional target portions for RNAi to inhibit        influenza virus.
tggcaatgaaatatccaat

SEQ ID NO: 2634 - DNA, 19 bp, Artificial
  Sequences of functional target portions for RNAi to inhibit        influenza virus.
ggcaatgaaatatccaatt

SEQ ID NO: 2635 - DNA, 19 bp, Artificial
  Sequences of functional target portions for RNAi to inhibit        influenza virus.
gcaatgaaatatccaatta

SEQ ID NO: 2636 - DNA, 19 bp, Artificial
  Sequences of functional target portions for RNAi to inhibit        influenza virus.
caaactttatggagtaaaa

SEQ ID NO: 2637 - DNA, 19 bp, Artificial
  Sequences of functional target portions for RNAi to inhibit        influenza virus.
ccaataacaaatacagttc

SEQ ID NO: 2638 - DNA, 19 bp, Artificial
  Sequences of functional target portions for RNAi to inhibit        influenza virus.
ggatgtaatcatggaagtt

SEQ ID NO: 2639 - DNA, 19 bp, Artificial
  Sequences of functional target portions for RNAi to inhibit        influenza virus.
caaggaacatgctgggaac

SEQ ID NO: 2640 - DNA, 19 bp, Artificial
  Sequences of functional target portions for RNAi to inhibit        influenza virus.
ggaacatgctgggaacaga

SEQ ID NO: 2641 - DNA, 19 bp, Artificial
  Sequences of functional target portions for RNAi to inhibit        influenza virus.
gaatgatgatgttgatcaa

SEQ ID NO: 2642 - DNA, 19 bp, Artificial
  Sequences of functional target portions for RNAi to inhibit        influenza virus.
tcagaggtgatctgaattt

SEQ ID NO: 2643 - DNA, 19 bp, Artificial
  Sequences of functional target portions for RNAi to inhibit        influenza virus.
agaaactgacaataactta

SEQ ID NO: 2644 - DNA, 19 bp, Artificial
  Sequences of functional target portions for RNAi to inhibit        influenza virus.
tatcaatggatcatcagaa

SEQ ID NO: 2645 - DNA, 19 bp, Artificial
  Sequences of functional target portions for RNAi to inhibit        influenza virus.
atcaatggatcatcagaaa

SEQ ID NO: 2646 - DNA, 19 bp, Artificial
  Sequences of functional target portions for RNAi to inhibit        influenza virus.
caatggatcatcagaaact

SEQ ID NO: 2647 - DNA, 19 bp, Artificial
  Sequences of functional target portions for RNAi to inhibit        influenza virus.
gatcatcagaaactgggaa

SEQ ID NO: 2648 - DNA, 19 bp, Artificial
  Sequences of functional target portions for RNAi to inhibit        influenza virus.
atcatcagaaactgggaaa

SEQ ID NO: 2649 - DNA, 19 bp, Artificial
  Sequences of functional target portions for RNAi to inhibit        influenza virus.
catcagaaactgggaaact

SEQ ID NO: 2650 - DNA, 19 bp, Artificial
  Sequences of functional target portions for RNAi to inhibit        influenza virus.
agaaactgggaaactgtta

SEQ ID NO: 2651 - DNA, 19 bp, Artificial
  Sequences of functional target portions for RNAi to inhibit        influenza virus.
cctacaatgctatacaata

SEQ ID NO: 2652 - DNA, 19 bp, Artificial
  Sequences of functional target portions for RNAi to inhibit        influenza virus.
ctacaatgctatacaataa

SEQ ID NO: 2653 - DNA, 19 bp, Artificial
  Sequences of functional target portions for RNAi to inhibit        influenza virus.
aaatggaatttgaaccatt

SEQ ID NO: 2654 - DNA, 19 bp, Artificial
  Sequences of functional target portions for RNAi to inhibit        influenza virus.
gggatcaggaatgagaata

SEQ ID NO: 2655 - DNA, 19 bp, Artificial
  Sequences of functional target portions for RNAi to inhibit        influenza virus.
ggatcaggaatgagaatac

SEQ ID NO: 2656 - DNA, 19 bp, Artificial
  Sequences of functional target portions for RNAi to inhibit        influenza virus.
gcactaagcatcaatgaac

SEQ ID NO: 2657 - DNA, 19 bp, Artificial
  Sequences of functional target portions for RNAi to inhibit        influenza virus.
gcatcaatgaactgagcaa

SEQ ID NO: 2658 - DNA, 19 bp, Artificial
  Sequences of functional target portions for RNAi to inhibit        influenza virus.
cgggactctagcatactta

SEQ ID NO: 2659 - DNA, 19 bp, Artificial
  Sequences of functional target portions for RNAi to inhibit        influenza virus.
actgacagccagacagcga

SEQ ID NO: 2660 - DNA, 19 bp, Artificial
  Sequences of functional target portions for RNAi to inhibit        influenza virus.
agacagcgaccaaaagaat

SEQ ID NO: 2661 - DNA, 19 bp, Artificial
  Sequences of functional target portions for RNAi to inhibit        influenza virus.
aggcaaaccatttgaatgg

SEQ ID NO: 2662 - DNA, 19 bp, Artificial
  Sequences of functional target portions for RNAi to inhibit        influenza virus.
gcaaaccatttgaatggat

SEQ ID NO: 2663 - DNA, 19 bp, Artificial
  Sequences of functional target portions for RNAi to inhibit        influenza virus.
ccatttgaatggatgtcaa

SEQ ID NO: 2664 - DNA, 19 bp, Artificial
  Sequences of functional target portions for RNAi to inhibit        influenza virus.
catttgaatggatgtcaat

SEQ ID NO: 2665 - DNA, 19 bp, Artificial
  Sequences of functional target portions for RNAi to inhibit        influenza virus.
gacaatgaaccaagtggtt

SEQ ID NO: 2666 - DNA, 19 bp, Artificial
  Sequences of functional target portions for RNAi to inhibit        influenza virus.
aataatgttctcaaacaaa

SEQ ID NO: 2667 - DNA, 19 bp, Artificial
  Sequences of functional target portions for RNAi to inhibit        influenza virus.
gaaacttagaactcaaata

SEQ ID NO: 2668 - DNA, 19 bp, Artificial
  Sequences of functional target portions for RNAi to inhibit        influenza virus.
actcaaatacctgcagaaa

SEQ ID NO: 2669 - DNA, 19 bp, Artificial
  Sequences of functional target portions for RNAi to inhibit        influenza virus.
ctcaaatacctgcagaaat

SEQ ID NO: 2670 - DNA, 19 bp, Artificial
  Sequences of functional target portions for RNAi to inhibit        influenza virus.
tcaaatacctgcagaaatg

SEQ ID NO: 2671 - DNA, 19 bp, Artificial
  Sequences of functional target portions for RNAi to inhibit        influenza virus.
gcatcgatttgaaatattt

SEQ ID NO: 2672 - DNA, 19 bp, Artificial
  Sequences of functional target portions for RNAi to inhibit        influenza virus.
ttgaaatatttcaatgatt

SEQ ID NO: 2673 - DNA, 19 bp, Artificial
  Sequences of functional target portions for RNAi to inhibit        influenza virus.
actacttactggtgggatg

SEQ ID NO: 2674 - DNA, 19 bp, Artificial
  Sequences of functional target portions for RNAi to inhibit        influenza virus.
cttcaatcctctgacgatt

SEQ ID NO: 2675 - DNA, 19 bp, Artificial
  Sequences of functional target portions for RNAi to inhibit        influenza virus.
ttggaatcaatatgagcaa

SEQ ID NO: 2676 - DNA, 19 bp, Artificial
  Sequences of functional target portions for RNAi to inhibit        influenza virus.
ggaatcaatatgagcaaga

SEQ ID NO: 2677 - DNA, 19 bp, Artificial
  Sequences of functional target portions for RNAi to inhibit        influenza virus.
gaacaggtacatttgaatt

SEQ ID NO: 2678 - DNA, 19 bp, Artificial
  Sequences of functional target portions for RNAi to inhibit        influenza virus.
acatttgaattcacaagtt

SEQ ID NO: 2679 - DNA, 19 bp, Artificial
  Sequences of functional target portions for RNAi to inhibit        influenza virus.
catttgaattcacaagttt

SEQ ID NO: 2680 - DNA, 19 bp, Artificial
  Sequences of functional target portions for RNAi to inhibit        influenza virus.
ggacatgagtattggagtt

SEQ ID NO: 2681 - DNA, 19 bp, Artificial
  Sequences of functional target portions for RNAi to inhibit        influenza virus.
gacatgagtattggagtta

SEQ ID NO: 2682 - DNA, 19 bp, Artificial
  Sequences of functional target portions for RNAi to inhibit        influenza virus.
catgagtattggagttact

SEQ ID NO: 2683 - DNA, 19 bp, Artificial
  Sequences of functional target portions for RNAi to inhibit        influenza virus.
aaacaatatgataaacaat

SEQ ID NO: 2684 - DNA, 19 bp, Artificial
  Sequences of functional target portions for RNAi to inhibit        influenza virus.
acaatatgataaacaatga

SEQ ID NO: 2685 - DNA, 19 bp, Artificial
  Sequences of functional target portions for RNAi to inhibit        influenza virus.
atgccatagaggtgacaca

SEQ ID NO: 2686 - DNA, 19 bp, Artificial
  Sequences of functional target portions for RNAi to inhibit        influenza virus.
catagaggtgacacacaaa

SEQ ID NO: 2687 - DNA, 19 bp, Artificial
  Sequences of functional target portions for RNAi to inhibit        influenza virus.
tagaggtgacacacaaata

SEQ ID NO: 2688 - DNA, 19 bp, Artificial
  Sequences of functional target portions for RNAi to inhibit        influenza virus.
ggtgacacacaaatacaaa

SEQ ID NO: 2689 - DNA, 19 bp, Artificial
  Sequences of functional target portions for RNAi to inhibit        influenza virus.
ccaaatttatacaacatta

SEQ ID NO: 2690 - DNA, 19 bp, Artificial
  Sequences of functional target portions for RNAi to inhibit        influenza virus.
ccactgaacccatttgtca

SEQ ID NO: 2691 - DNA, 19 bp, Artificial
  Sequences of functional target portions for RNAi to inhibit        influenza virus.
tttgtcagccataaagaaa

SEQ ID NO: 2692 - DNA, 19 bp, Artificial
  Sequences of functional target portions for RNAi to inhibit        influenza virus.
agccataaagaaattgaat

SEQ ID NO: 2693 - DNA, 19 bp, Artificial
  Sequences of functional target portions for RNAi to inhibit        influenza virus.
ccataaagaaattgaatca

SEQ ID NO: 2694 - DNA, 19 bp, Artificial
  Sequences of functional target portions for RNAi to inhibit        influenza virus.
cataaagaaattgaatcaa

SEQ ID NO: 2695 - DNA, 19 bp, Artificial
  Sequences of functional target portions for RNAi to inhibit        influenza virus.
ataaagaaattgaatcaat

SEQ ID NO: 2696 - DNA, 19 bp, Artificial
  Sequences of functional target portions for RNAi to inhibit        influenza virus.
taaagaaattgaatcaatg

SEQ ID NO: 2697 - DNA, 19 bp, Artificial
  Sequences of functional target portions for RNAi to inhibit        influenza virus.
aaagaaattgaatcaatga

SEQ ID NO: 2698 - DNA, 19 bp, Artificial
  Sequences of functional target portions for RNAi to inhibit        influenza virus.
agaaatcgatccatcttga

SEQ ID NO: 2699 - DNA, 19 bp, Artificial
  Sequences of functional target portions for RNAi to inhibit        influenza virus.
acttgaagatgaacaaatg

SEQ ID NO: 2700 - DNA, 19 bp, Artificial
  Sequences of functional target portions for RNAi to inhibit        influenza virus.
ttgaagatgaacaaatgta

SEQ ID NO: 2701 - DNA, 19 bp, Artificial
  Sequences of functional target portions for RNAi to inhibit        influenza virus.
aagatgaacaaatgtacca

SEQ ID NO: 2702 - DNA, 19 bp, Artificial
  Sequences of functional target portions for RNAi to inhibit        influenza virus.
gatgaacaaatgtaccaaa

SEQ ID NO: 2703 - DNA, 19 bp, Artificial
  Sequences of functional target portions for RNAi to inhibit        influenza virus.
cagcagttcatacagaaga

SEQ ID NO: 2704 - DNA, 19 bp, Artificial
  Sequences of functional target portions for RNAi to inhibit        influenza virus.
tttcgaatctggaaggata

SEQ ID NO: 2705 - DNA, 19 bp, Artificial
  Sequences of functional target portions for RNAi to inhibit        influenza virus.
atctggaaggataaagaaa

SEQ ID NO: 2706 - DNA, 19 bp, Artificial
  Sequences of functional target portions for RNAi to inhibit        influenza virus.
ctggaaggataaagaaaga

SEQ ID NO: 2707 - DNA, 19 bp, Artificial
  Sequences of functional target portions for RNAi to inhibit        influenza virus.
ggaaggataaagaaagaag

SEQ ID NO: 2708 - DNA, 19 bp, Artificial
  Sequences of functional target portions for RNAi to inhibit        influenza virus.
gaaggataaagaaagaaga

SEQ ID NO: 2709 - DNA, 19 bp, Artificial
  Sequences of functional target portions for RNAi to inhibit        influenza virus.
tcactgagatcatgaagat

SEQ ID NO: 2710 - DNA, 19 bp, Artificial
  Sequences of functional target portions for RNAi to inhibit        influenza virus.
atgaagatctgttccacca

SEQ ID NO: 2711 - DNA, 19 bp, Artificial
  Sequences of functional target portions for RNAi to inhibit        influenza virus.
gatctgttccaccattgaa

SEQ ID NO: 2712 - DNA, 19 bp, Artificial
  Sequences of functional target portions for RNAi to inhibit        influenza virus.
gaatttagcttgtccttca

SEQ ID NO: 2713 - DNA, 19 bp, Artificial
  Sequences of functional target portions for RNAi to inhibit        influenza virus.
gaaagcaggtactgatcca

SEQ ID NO: 2714 - DNA, 19 bp, Artificial
  Sequences of functional target portions for RNAi to inhibit        influenza virus.
aagcaggtactgatccaaa

SEQ ID NO: 2715 - DNA, 19 bp, Artificial
  Sequences of functional target portions for RNAi to inhibit        influenza virus.
cgacaatgcttcaatccga

SEQ ID NO: 2716 - DNA, 19 bp, Artificial
  Sequences of functional target portions for RNAi to inhibit        influenza virus.
acctgaaaatcgaaacaaa

SEQ ID NO: 2717 - DNA, 19 bp, Artificial
  Sequences of functional target portions for RNAi to inhibit        influenza virus.
gaagtatgcttcatgtatt

SEQ ID NO: 2718 - DNA, 19 bp, Artificial
  Sequences of functional target portions for RNAi to inhibit        influenza virus.
gcttcatgtattcagattt

SEQ ID NO: 2719 - DNA, 19 bp, Artificial
  Sequences of functional target portions for RNAi to inhibit        influenza virus.
gcacagatttgaaataatc

SEQ ID NO: 2720 - DNA, 19 bp, Artificial
  Sequences of functional target portions for RNAi to inhibit        influenza virus.
gaatagattcatcgaaatt

SEQ ID NO: 2721 - DNA, 19 bp, Artificial
  Sequences of functional target portions for RNAi to inhibit        influenza virus.
actacactctcgatgaaga

SEQ ID NO: 2722 - DNA, 19 bp, Artificial
  Sequences of functional target portions for RNAi to inhibit        influenza virus.
gatcaaaaccagactattc

SEQ ID NO: 2723 - DNA, 19 bp, Artificial
  Sequences of functional target portions for RNAi to inhibit        influenza virus.
aaaccagactattcaccat

SEQ ID NO: 2724 - DNA, 19 bp, Artificial
  Sequences of functional target portions for RNAi to inhibit        influenza virus.
actattcaccataagacaa

SEQ ID NO: 2725 - DNA, 19 bp, Artificial
  Sequences of functional target portions for RNAi to inhibit        influenza virus.
tcaccataagacaagaaat

SEQ ID NO: 2726 - DNA, 19 bp, Artificial
  Sequences of functional target portions for RNAi to inhibit        influenza virus.
caccataagacaagaaatg

SEQ ID NO: 2727 - DNA, 19 bp, Artificial
  Sequences of functional target portions for RNAi to inhibit        influenza virus.
acccaagtcatgaaggaga

SEQ ID NO: 2728 - DNA, 19 bp, Artificial
  Sequences of functional target portions for RNAi to inhibit        influenza virus.
ggaataaatccaaattatc

SEQ ID NO: 2729 - DNA, 19 bp, Artificial
  Sequences of functional target portions for RNAi to inhibit        influenza virus.
ctagcaagttggattcaga

SEQ ID NO: 2730 - DNA, 19 bp, Artificial
  Sequences of functional target portions for RNAi to inhibit        influenza virus.
ccaattgaacacattgcaa

SEQ ID NO: 2731 - DNA, 19 bp, Artificial
  Sequences of functional target portions for RNAi to inhibit        influenza virus.
gaacacattgcaagcatga

SEQ ID NO: 2732 - DNA, 19 bp, Artificial
  Sequences of functional target portions for RNAi to inhibit        influenza virus.
actgcagagccacagaata

SEQ ID NO: 2733 - DNA, 19 bp, Artificial
  Sequences of functional target portions for RNAi to inhibit        influenza virus.
ctgcagagccacagaatac

SEQ ID NO: 2734 - DNA, 19 bp, Artificial
  Sequences of functional target portions for RNAi to inhibit        influenza virus.
gagccacagaatacataat

SEQ ID NO: 2735 - DNA, 19 bp, Artificial
  Sequences of functional target portions for RNAi to inhibit        influenza virus.
gccacagaatacataatga

SEQ ID NO: 2736 - DNA, 19 bp, Artificial
  Sequences of functional target portions for RNAi to inhibit        influenza virus.
ccacagaatacataatgaa

SEQ ID NO: 2737 - DNA, 19 bp, Artificial
  Sequences of functional target portions for RNAi to inhibit        influenza virus.
caatggatgatttccaatt

SEQ ID NO: 2738 - DNA, 19 bp, Artificial
  Sequences of functional target portions for RNAi to inhibit        influenza virus.
atggatgatttccaattaa

SEQ ID NO: 2739 - DNA, 19 bp, Artificial
  Sequences of functional target portions for RNAi to inhibit        influenza virus.
tggatgatttccaattaat

SEQ ID NO: 2740 - DNA, 19 bp, Artificial
  Sequences of functional target portions for RNAi to inhibit        influenza virus.
ggatgatttccaattaatt

SEQ ID NO: 2741 - DNA, 19 bp, Artificial
  Sequences of functional target portions for RNAi to inhibit        influenza virus.
caattaattccaatgataa

SEQ ID NO: 2742 - DNA, 19 bp, Artificial
  Sequences of functional target portions for RNAi to inhibit        influenza virus.
ggaagatcccacttaagga

SEQ ID NO: 2743 - DNA, 19 bp, Artificial
  Sequences of functional target portions for RNAi to inhibit        influenza virus.
tggtaaactttgtgagcat

SEQ ID NO: 2744 - DNA, 19 bp, Artificial
  Sequences of functional target portions for RNAi to inhibit        influenza virus.
tgacccaagacttgaacca

SEQ ID NO: 2745 - DNA, 19 bp, Artificial
  Sequences of functional target portions for RNAi to inhibit        influenza virus.
acccaagacttgaaccaca

SEQ ID NO: 2746 - DNA, 19 bp, Artificial
  Sequences of functional target portions for RNAi to inhibit        influenza virus.
aagacttgaaccacataaa

SEQ ID NO: 2747 - DNA, 19 bp, Artificial
  Sequences of functional target portions for RNAi to inhibit        influenza virus.
gaaccacataaatgggaga

SEQ ID NO: 2748 - DNA, 19 bp, Artificial
  Sequences of functional target portions for RNAi to inhibit        influenza virus.
ctccacaactagaaggatt

SEQ ID NO: 2749 - DNA, 19 bp, Artificial
  Sequences of functional target portions for RNAi to inhibit        influenza virus.
ggctatatgaagcaattga

SEQ ID NO: 2750 - DNA, 19 bp, Artificial
  Sequences of functional target portions for RNAi to inhibit        influenza virus.
gcaattgaggagtgcctga

SEQ ID NO: 2751 - DNA, 19 bp, Artificial
  Sequences of functional target portions for RNAi to inhibit        influenza virus.
attgaggagtgcctgatta

SEQ ID NO: 2752 - DNA, 19 bp, Artificial
  Sequences of functional target portions for RNAi to inhibit        influenza virus.
ttgaggagtgcctgattaa

SEQ ID NO: 2753 - DNA, 19 bp, Artificial
  Sequences of functional target portions for RNAi to inhibit        influenza virus.
aggagtgcctgattaatga

SEQ ID NO: 2754 - DNA, 19 bp, Artificial
  Sequences of functional target portions for RNAi to inhibit        influenza virus.
gattaatgatccctgggtt

SEQ ID NO: 2755 - DNA, 19 bp, Artificial
  Sequences of functional target portions for RNAi to inhibit        influenza virus.
attaatgatccctgggttt

SEQ ID NO: 2756 - DNA, 19 bp, Artificial
  Sequences of functional target portions for RNAi to inhibit        influenza virus.
cttaatgcttcttggttca

SEQ ID NO: 2757 - DNA, 19 bp, Artificial
  Sequences of functional target portions for RNAi to inhibit        influenza virus.
gaaagcaggtagatattga

SEQ ID NO: 2758 - DNA, 19 bp, Artificial
  Sequences of functional target portions for RNAi to inhibit        influenza virus.
aagcaggtagatattgaaa

SEQ ID NO: 2759 - DNA, 19 bp, Artificial
  Sequences of functional target portions for RNAi to inhibit        influenza virus.
taaccgaggtcgaaacgta

SEQ ID NO: 2760 - DNA, 19 bp, Artificial
  Sequences of functional target portions for RNAi to inhibit        influenza virus.
gagacttgaagatgtcttt

SEQ ID NO: 2761 - DNA, 19 bp, Artificial
  Sequences of functional target portions for RNAi to inhibit        influenza virus.
gaacactgatcttgaggtt

SEQ ID NO: 2762 - DNA, 19 bp, Artificial
  Sequences of functional target portions for RNAi to inhibit        influenza virus.
gttctcatggaatggctaa

SEQ ID NO: 2763 - DNA, 19 bp, Artificial
  Sequences of functional target portions for RNAi to inhibit        influenza virus.
catggaatggctaaagaca

SEQ ID NO: 2764 - DNA, 19 bp, Artificial
  Sequences of functional target portions for RNAi to inhibit        influenza virus.
atggaatggctaaagacaa

SEQ ID NO: 2765 - DNA, 19 bp, Artificial
  Sequences of functional target portions for RNAi to inhibit        influenza virus.
tggaatggctaaagacaag

SEQ ID NO: 2766 - DNA, 19 bp, Artificial
  Sequences of functional target portions for RNAi to inhibit        influenza virus.
gagcgaggactgcagcgta

SEQ ID NO: 2767 - DNA, 19 bp, Artificial
  Sequences of functional target portions for RNAi to inhibit        influenza virus.
gatccaaataacatggaca

SEQ ID NO: 2768 - DNA, 19 bp, Artificial
  Sequences of functional target portions for RNAi to inhibit        influenza virus.
atccaaataacatggacaa

SEQ ID NO: 2769 - DNA, 19 bp, Artificial
  Sequences of functional target portions for RNAi to inhibit        influenza virus.
tccaaataacatggacaaa

SEQ ID NO: 2770 - DNA, 19 bp, Artificial
  Sequences of functional target portions for RNAi to inhibit        influenza virus.
ccaaataacatggacaaag

SEQ ID NO: 2771 - DNA, 19 bp, Artificial
  Sequences of functional target portions for RNAi to inhibit        influenza virus.
caaataacatggacaaagc

SEQ ID NO: 2772 - DNA, 19 bp, Artificial
  Sequences of functional target portions for RNAi to inhibit        influenza virus.
taacatggacaaagcagtt

SEQ ID NO: 2773 - DNA, 19 bp, Artificial
  Sequences of functional target portions for RNAi to inhibit        influenza virus.
acatggacaaagcagttaa

SEQ ID NO: 2774 - DNA, 19 bp, Artificial
  Sequences of functional target portions for RNAi to inhibit        influenza virus.
catggacaaagcagttaaa

SEQ ID NO: 2775 - DNA, 19 bp, Artificial
  Sequences of functional target portions for RNAi to inhibit        influenza virus.
tggacaaagcagttaaact

SEQ ID NO: 2776 - DNA, 19 bp, Artificial
  Sequences of functional target portions for RNAi to inhibit        influenza virus.
ggacaaagcagttaaactg

SEQ ID NO: 2777 - DNA, 19 bp, Artificial
  Sequences of functional target portions for RNAi to inhibit        influenza virus.
gatgagaaccattgggact

SEQ ID NO: 2778 - DNA, 19 bp, Artificial
  Sequences of functional target portions for RNAi to inhibit        influenza virus.
gcacttgacattgtggatt

SEQ ID NO: 2779 - DNA, 19 bp, Artificial
  Sequences of functional target portions for RNAi to inhibit        influenza virus.
ccaaagtctatgagggaag

SEQ ID NO: 2780 - DNA, 19 bp, Artificial
  Sequences of functional target portions for RNAi to inhibit        influenza virus.
agtctatgagggaagaata

SEQ ID NO: 2781 - DNA, 19 bp, Artificial
  Sequences of functional target portions for RNAi to inhibit        influenza virus.
gtctatgagggaagaatat

SEQ ID NO: 2782 - DNA, 19 bp, Artificial
  Sequences of functional target portions for RNAi to inhibit        influenza virus.
tgtcaagctttcaggtaga

SEQ ID NO: 2783 - DNA, 19 bp, Artificial
  Sequences of functional target portions for RNAi to inhibit        influenza virus.
gctttcaggtagattgctt

SEQ ID NO: 2784 - DNA, 19 bp, Artificial
  Sequences of functional target portions for RNAi to inhibit        influenza virus.
taacacagttcgagtctct

SEQ ID NO: 2785 - DNA, 19 bp, Artificial
  Sequences of functional target portions for RNAi to inhibit        influenza virus.
cagtaatgagaatgggaga

SEQ ID NO: 2786 - DNA, 19 bp, Artificial
  Sequences of functional target portions for RNAi to inhibit        influenza virus.
tgaagaaataagatggttg

SEQ ID NO: 2787 - DNA, 19 bp, Artificial
  Sequences of functional target portions for RNAi to inhibit        influenza virus.
gaagaaataagatggttga

SEQ ID NO: 2788 - DNA, 19 bp, Artificial
  Sequences of functional target portions for RNAi to inhibit        influenza virus.
ggacatataatgcagaatt

SEQ ID NO: 2789 - DNA, 19 bp, Artificial
  Sequences of functional target portions for RNAi to inhibit        influenza virus.
gccactgaaatcagagcat

SEQ ID NO: 2790 - DNA, 19 bp, Artificial
  Sequences of functional target portions for RNAi to inhibit        influenza virus.
tcagagcatccgtcggaaa

SEQ ID NO: 2791 - DNA, 19 bp, Artificial
  Sequences of functional target portions for RNAi to inhibit        influenza virus.
cctttatgacaaagaagaa

SEQ ID NO: 2792 - DNA, 19 bp, Artificial
  Sequences of functional target portions for RNAi to inhibit        influenza virus.
ctttatgacaaagaagaaa

SEQ ID NO: 2793 - DNA, 19 bp, Artificial
  Sequences of functional target portions for RNAi to inhibit        influenza virus.
tttatgacaaagaagaaat

SEQ ID NO: 2794 - DNA, 19 bp, Artificial
  Sequences of functional target portions for RNAi to inhibit        influenza virus.
ttatgacaaagaagaaata

SEQ ID NO: 2795 - DNA, 19 bp, Artificial
  Sequences of functional target portions for RNAi to inhibit        influenza virus.
gcaatgatggatcaagtga

SEQ ID NO: 2796 - DNA, 19 bp, Artificial
  Sequences of functional target portions for RNAi to inhibit        influenza virus.
gtaatgaaggatcttattt

SEQ ID NO: 2797 - DNA, 19 bp, Artificial
  Sequences of functional target portions for RNAi to inhibit        influenza virus.
ggatcttatttcttcggag

SEQ ID NO: 2798 - DNA, 19 bp, Artificial
  Sequences of functional target portions for RNAi to inhibit        influenza virus.
gatcttatttcttcggaga

SEQ ID NO: 2799 - DNA, 19 bp, Artificial
  Sequences of functional target portions for RNAi to inhibit        influenza virus.
aggtcaattatattcaata

SEQ ID NO: 2800 - DNA, 19 bp, Artificial
  Sequences of functional target portions for RNAi to inhibit        influenza virus.
ggtcaattatattcaatat

SEQ ID NO: 2801 - DNA, 19 bp, Artificial
  Sequences of functional target portions for RNAi to inhibit        influenza virus.
caattatattcaatatgga

SEQ ID NO: 2802 - DNA, 19 bp, Artificial
  Sequences of functional target portions for RNAi to inhibit        influenza virus.
aattatattcaatatggaa

SEQ ID NO: 2803 - DNA, 19 bp, Artificial
  Sequences of functional target portions for RNAi to inhibit        influenza virus.
attatattcaatatggaaa

SEQ ID NO: 2804 - DNA, 19 bp, Artificial
  Sequences of functional target portions for RNAi to inhibit        influenza virus.
tattcaatatggaaagaat

SEQ ID NO: 2805 - DNA, 19 bp, Artificial
  Sequences of functional target portions for RNAi to inhibit        influenza virus.
attcaatatggaaagaata

SEQ ID NO: 2806 - DNA, 19 bp, Artificial
  Sequences of functional target portions for RNAi to inhibit        influenza virus.
ttcaatatggaaagaataa

SEQ ID NO: 2807 - DNA, 19 bp, Artificial
  Sequences of functional target portions for RNAi to inhibit        influenza virus.
tcaatatggaaagaataaa

SEQ ID NO: 2808 - DNA, 19 bp, Artificial
  Sequences of functional target portions for RNAi to inhibit        influenza virus.
caatatggaaagaataaaa

SEQ ID NO: 2809 - DNA, 19 bp, Artificial
  Sequences of functional target portions for RNAi to inhibit        influenza virus.
gaactaagaaatctaatgt

SEQ ID NO: 2810 - DNA, 19 bp, Artificial
  Sequences of functional target portions for RNAi to inhibit        influenza virus.
atgaaatggatgatggcaa

SEQ ID NO: 2811 - DNA, 19 bp, Artificial
  Sequences of functional target portions for RNAi to inhibit        influenza virus.
tgaaatggatgatggcaat

SEQ ID NO: 2812 - DNA, 19 bp, Artificial
  Sequences of functional target portions for RNAi to inhibit        influenza virus.
atggatgatggcaatgaaa

SEQ ID NO: 2813 - DNA, 19 bp, Artificial
  Sequences of functional target portions for RNAi to inhibit        influenza virus.
tggatgatggcaatgaaat

SEQ ID NO: 2814 - DNA, 19 bp, Artificial
  Sequences of functional target portions for RNAi to inhibit        influenza virus.
ggatgatggcaatgaaata

SEQ ID NO: 2815 - DNA, 19 bp, Artificial
  Sequences of functional target portions for RNAi to inhibit        influenza virus.
caaactttatggagtaaaa

SEQ ID NO: 2816 - DNA, 19 bp, Artificial
  Sequences of functional target portions for RNAi to inhibit        influenza virus.
ccaataacaaatacagttc

SEQ ID NO: 2817 - DNA, 19 bp, Artificial
  Sequences of functional target portions for RNAi to inhibit        influenza virus.
ggatgtaatcatggaagtt

SEQ ID NO: 2818 - DNA, 19 bp, Artificial
  Sequences of functional target portions for RNAi to inhibit        influenza virus.
caaggaacatgctgggaac

SEQ ID NO: 2819 - DNA, 19 bp, Artificial
  Sequences of functional target portions for RNAi to inhibit        influenza virus.
ggaacatgctgggaacaga

SEQ ID NO: 2820 - DNA, 19 bp, Artificial
  Sequences of functional target portions for RNAi to inhibit        influenza virus.
tatcaatggatcatcagaa

SEQ ID NO: 2821 - DNA, 19 bp, Artificial
  Sequences of functional target portions for RNAi to inhibit        influenza virus.
atcaatggatcatcagaaa

SEQ ID NO: 2822 - DNA, 19 bp, Artificial
  Sequences of functional target portions for RNAi to inhibit        influenza virus.
caatggatcatcagaaact

SEQ ID NO: 2823 - DNA, 19 bp, Artificial
  Sequences of functional target portions for RNAi to inhibit        influenza virus.
gatcatcagaaactgggaa

SEQ ID NO: 2824 - DNA, 19 bp, Artificial
  Sequences of functional target portions for RNAi to inhibit        influenza virus.
atcatcagaaactgggaaa

SEQ ID NO: 2825 - DNA, 19 bp, Artificial
  Sequences of functional target portions for RNAi to inhibit        influenza virus.
catcagaaactgggaaact

SEQ ID NO: 2826 - DNA, 19 bp, Artificial
  Sequences of functional target portions for RNAi to inhibit        influenza virus.
cctacaatgctatacaata

SEQ ID NO: 2827 - DNA, 19 bp, Artificial
  Sequences of functional target portions for RNAi to inhibit        influenza virus.
ctacaatgctatacaataa

SEQ ID NO: 2828 - DNA, 19 bp, Artificial
  Sequences of functional target portions for RNAi to inhibit        influenza virus.
aaatggaatttgaaccatt

SEQ ID NO: 2829 - DNA, 19 bp, Artificial
  Sequences of functional target portions for RNAi to inhibit        influenza virus.
gggatcaggaatgagaata

SEQ ID NO: 2830 - DNA, 19 bp, Artificial
  Sequences of functional target portions for RNAi to inhibit        influenza virus.
ggatcaggaatgagaatac

SEQ ID NO: 2831 - DNA, 19 bp, Artificial
  Sequences of functional target portions for RNAi to inhibit        influenza virus.
gcatcaatgaactgagcaa

SEQ ID NO: 2832 - DNA, 19 bp, Artificial
  Sequences of functional target portions for RNAi to inhibit        influenza virus.
cgggactctagcatactta

SEQ ID NO: 2833 - DNA, 19 bp, Artificial
  Sequences of functional target portions for RNAi to inhibit        influenza virus.
actgacagccagacagcga

SEQ ID NO: 2834 - DNA, 19 bp, Artificial
  Sequences of functional target portions for RNAi to inhibit        influenza virus.
agacagcgaccaaaagaat

SEQ ID NO: 2835 - DNA, 19 bp, Artificial
  Sequences of functional target portions for RNAi to inhibit        influenza virus.
aggcaaaccatttgaatgg

SEQ ID NO: 2836 - DNA, 19 bp, Artificial
  Sequences of functional target portions for RNAi to inhibit        influenza virus.
gcaaaccatttgaatggat

SEQ ID NO: 2837 - DNA, 19 bp, Artificial
  Sequences of functional target portions for RNAi to inhibit        influenza virus.
ccatttgaatggatgtcaa

SEQ ID NO: 2838 - DNA, 19 bp, Artificial
  Sequences of functional target portions for RNAi to inhibit        influenza virus.
catttgaatggatgtcaat

SEQ ID NO: 2839 - DNA, 19 bp, Artificial
  Sequences of functional target portions for RNAi to inhibit        influenza virus.
gacaatgaaccaagtggtt

SEQ ID NO: 2840 - DNA, 19 bp, Artificial
  Sequences of functional target portions for RNAi to inhibit        influenza virus.
aagcaatggctttccttga

SEQ ID NO: 2841 - DNA, 19 bp, Artificial
  Sequences of functional target portions for RNAi to inhibit        influenza virus.
acctatgactggactctaa

SEQ ID NO: 2842 - DNA, 19 bp, Artificial
  Sequences of functional target portions for RNAi to inhibit        influenza virus.
actggactctaaatagaaa

SEQ ID NO: 2843 - DNA, 19 bp, Artificial
  Sequences of functional target portions for RNAi to inhibit        influenza virus.
agttatctaattagagcat

SEQ ID NO: 2844 - DNA, 19 bp, Artificial
  Sequences of functional target portions for RNAi to inhibit        influenza virus.
gctccaataatgttctcaa

SEQ ID NO: 2845 - DNA, 19 bp, Artificial
  Sequences of functional target portions for RNAi to inhibit        influenza virus.
ctccaataatgttctcaaa

SEQ ID NO: 2846 - DNA, 19 bp, Artificial
  Sequences of functional target portions for RNAi to inhibit        influenza virus.
caataatgttctcaaacaa

SEQ ID NO: 2847 - DNA, 19 bp, Artificial
  Sequences of functional target portions for RNAi to inhibit        influenza virus.
aataatgttctcaaacaaa

SEQ ID NO: 2848 - DNA, 19 bp, Artificial
  Sequences of functional target portions for RNAi to inhibit        influenza virus.
gaaacttagaactcaaata

SEQ ID NO: 2849 - DNA, 19 bp, Artificial
  Sequences of functional target portions for RNAi to inhibit        influenza virus.
ttgaaatatttcaatgatt

SEQ ID NO: 2850 - DNA, 19 bp, Artificial
  Sequences of functional target portions for RNAi to inhibit        influenza virus.
actacttactggtgggatg

SEQ ID NO: 2851 - DNA, 19 bp, Artificial
  Sequences of functional target portions for RNAi to inhibit        influenza virus.
ggaatcaatatgagcaaga

SEQ ID NO: 2852 - DNA, 19 bp, Artificial
  Sequences of functional target portions for RNAi to inhibit        influenza virus.
gaacaggtacatttgaatt

SEQ ID NO: 2853 - DNA, 19 bp, Artificial
  Sequences of functional target portions for RNAi to inhibit        influenza virus.
acatttgaattcacaagtt

SEQ ID NO: 2854 - DNA, 19 bp, Artificial
  Sequences of functional target portions for RNAi to inhibit        influenza virus.
catttgaattcacaagttt

SEQ ID NO: 2855 - DNA, 19 bp, Artificial
  Sequences of functional target portions for RNAi to inhibit        influenza virus.
gacatgagtattggagtta

SEQ ID NO: 2856 - DNA, 19 bp, Artificial
  Sequences of functional target portions for RNAi to inhibit        influenza virus.
aaacaatatgataaacaat

SEQ ID NO: 2857 - DNA, 19 bp, Artificial
  Sequences of functional target portions for RNAi to inhibit        influenza virus.
acaatatgataaacaatga

SEQ ID NO: 2858 - DNA, 19 bp, Artificial
  Sequences of functional target portions for RNAi to inhibit        influenza virus.
atgccatagaggtgacaca

SEQ ID NO: 2859 - DNA, 19 bp, Artificial
  Sequences of functional target portions for RNAi to inhibit        influenza virus.
catagaggtgacacacaaa

SEQ ID NO: 2860 - DNA, 19 bp, Artificial
  Sequences of functional target portions for RNAi to inhibit        influenza virus.
tagaggtgacacacaaata

SEQ ID NO: 2861 - DNA, 19 bp, Artificial
  Sequences of functional target portions for RNAi to inhibit        influenza virus.
ggtgacacacaaatacaaa

SEQ ID NO: 2862 - DNA, 19 bp, Artificial
  Sequences of functional target portions for RNAi to inhibit        influenza virus.
ccaaatttatacaacatta

SEQ ID NO: 2863 - DNA, 19 bp, Artificial
  Sequences of functional target portions for RNAi to inhibit        influenza virus.
tttgtcagccataaagaaa

SEQ ID NO: 2864 - DNA, 19 bp, Artificial
  Sequences of functional target portions for RNAi to inhibit        influenza virus.
agccataaagaaattgaat

SEQ ID NO: 2865 - DNA, 19 bp, Artificial
  Sequences of functional target portions for RNAi to inhibit        influenza virus.
ccataaagaaattgaatca

SEQ ID NO: 2866 - DNA, 19 bp, Artificial
  Sequences of functional target portions for RNAi to inhibit        influenza virus.
cataaagaaattgaatcaa

SEQ ID NO: 2867 - DNA, 19 bp, Artificial
  Sequences of functional target portions for RNAi to inhibit        influenza virus.
aaagaaattgaatcaatga

SEQ ID NO: 2868 - DNA, 19 bp, Artificial
  Sequences of functional target portions for RNAi to inhibit        influenza virus.
agaaatcgatccatcttga

SEQ ID NO: 2869 - DNA, 19 bp, Artificial
  Sequences of functional target portions for RNAi to inhibit        influenza virus.
ttgaagatgaacaaatgta

SEQ ID NO: 2870 - DNA, 19 bp, Artificial
  Sequences of functional target portions for RNAi to inhibit        influenza virus.
aagatgaacaaatgtacca

SEQ ID NO: 2871 - DNA, 19 bp, Artificial
  Sequences of functional target portions for RNAi to inhibit        influenza virus.
gatgaacaaatgtaccaaa

SEQ ID NO: 2872 - DNA, 19 bp, Artificial
  Sequences of functional target portions for RNAi to inhibit        influenza virus.
cagcagttcatacagaaga

SEQ ID NO: 2873 - DNA, 19 bp, Artificial
  Sequences of functional target portions for RNAi to inhibit        influenza virus.
tttcgaatctggaaggata

SEQ ID NO: 2874 - DNA, 19 bp, Artificial
  Sequences of functional target portions for RNAi to inhibit        influenza virus.
atctggaaggataaagaaa

SEQ ID NO: 2875 - DNA, 19 bp, Artificial
  Sequences of functional target portions for RNAi to inhibit        influenza virus.
ctggaaggataaagaaaga

SEQ ID NO: 2876 - DNA, 19 bp, Artificial
  Sequences of functional target portions for RNAi to inhibit        influenza virus.
ggaaggataaagaaagaag

SEQ ID NO: 2877 - DNA, 19 bp, Artificial
  Sequences of functional target portions for RNAi to inhibit        influenza virus.
gaaggataaagaaagaaga

SEQ ID NO: 2878 - DNA, 19 bp, Artificial
  Sequences of functional target portions for RNAi to inhibit        influenza virus.
tcactgagatcatgaagat

SEQ ID NO: 2879 - DNA, 19 bp, Artificial
  Sequences of functional target portions for RNAi to inhibit        influenza virus.
atgaagatctgttccacca

SEQ ID NO: 2880 - DNA, 19 bp, Artificial
  Sequences of functional target portions for RNAi to inhibit        influenza virus.
gatctgttccaccattgaa

SEQ ID NO: 2881 - DNA, 19 bp, Artificial
  Sequences of functional target portions for RNAi to inhibit        influenza virus.
gaatttagcttgtccttca

SEQ ID NO: 2882 - DNA, 19 bp, Artificial
  Sequences of functional target portions for RNAi to inhibit        influenza virus.
aagcaggtactgatccaaa

SEQ ID NO: 2883 - DNA, 19 bp, Artificial
  Sequences of functional target portions for RNAi to inhibit        influenza virus.
cgacaatgcttcaatccga

SEQ ID NO: 2884 - DNA, 19 bp, Artificial
  Sequences of functional target portions for RNAi to inhibit        influenza virus.
gaagtatgcttcatgtatt

SEQ ID NO: 2885 - DNA, 19 bp, Artificial
  Sequences of functional target portions for RNAi to inhibit        influenza virus.
gcacagatttgaaataatc

SEQ ID NO: 2886 - DNA, 19 bp, Artificial
  Sequences of functional target portions for RNAi to inhibit        influenza virus.
actacactctcgatgaaga

SEQ ID NO: 2887 - DNA, 19 bp, Artificial
  Sequences of functional target portions for RNAi to inhibit        influenza virus.
aaaccagactattcaccat

SEQ ID NO: 2888 - DNA, 19 bp, Artificial
  Sequences of functional target portions for RNAi to inhibit        influenza virus.
tcaccataagacaagaaat

SEQ ID NO: 2889 - DNA, 19 bp, Artificial
  Sequences of functional target portions for RNAi to inhibit        influenza virus.
caccataagacaagaaatg

SEQ ID NO: 2890 - DNA, 19 bp, Artificial
  Sequences of functional target portions for RNAi to inhibit        influenza virus.
acccaagtcatgaaggaga

SEQ ID NO: 2891 - DNA, 19 bp, Artificial
  Sequences of functional target portions for RNAi to inhibit        influenza virus.
ctagcaagttggattcaga

SEQ ID NO: 2892 - DNA, 19 bp, Artificial
  Sequences of functional target portions for RNAi to inhibit        influenza virus.
ccaattgaacacattgcaa

SEQ ID NO: 2893 - DNA, 19 bp, Artificial
  Sequences of functional target portions for RNAi to inhibit        influenza virus.
gaacacattgcaagcatga

SEQ ID NO: 2894 - DNA, 19 bp, Artificial
  Sequences of functional target portions for RNAi to inhibit        influenza virus.
atggatgatttccaattaa

SEQ ID NO: 2895 - DNA, 19 bp, Artificial
  Sequences of functional target portions for RNAi to inhibit        influenza virus.
tggatgatttccaattaat

SEQ ID NO: 2896 - DNA, 19 bp, Artificial
  Sequences of functional target portions for RNAi to inhibit        influenza virus.
ggatgatttccaattaatt

SEQ ID NO: 2897 - DNA, 19 bp, Artificial
  Sequences of functional target portions for RNAi to inhibit        influenza virus.
caattaattccaatgataa

SEQ ID NO: 2898 - DNA, 19 bp, Artificial
  Sequences of functional target portions for RNAi to inhibit        influenza virus.
ggaagatcccacttaagga

SEQ ID NO: 2899 - DNA, 19 bp, Artificial
  Sequences of functional target portions for RNAi to inhibit        influenza virus.
tggtaaactttgtgagcat

SEQ ID NO: 2900 - DNA, 19 bp, Artificial
  Sequences of functional target portions for RNAi to inhibit        influenza virus.
tgacccaagacttgaacca

SEQ ID NO: 2901 - DNA, 19 bp, Artificial
  Sequences of functional target portions for RNAi to inhibit        influenza virus.
acccaagacttgaaccaca

SEQ ID NO: 2902 - DNA, 19 bp, Artificial
  Sequences of functional target portions for RNAi to inhibit        influenza virus.
aagacttgaaccacataaa

SEQ ID NO: 2903 - DNA, 19 bp, Artificial
  Sequences of functional target portions for RNAi to inhibit        influenza virus.
gaaccacataaatgggaga

SEQ ID NO: 2904 - DNA, 19 bp, Artificial
  Sequences of functional target portions for RNAi to inhibit        influenza virus.
ctccacaactagaaggatt

SEQ ID NO: 2905 - DNA, 19 bp, Artificial
  Sequences of functional target portions for RNAi to inhibit        influenza virus.
gcaattgaggagtgcctga

SEQ ID NO: 2906 - DNA, 19 bp, Artificial
  Sequences of functional target portions for RNAi to inhibit        influenza virus.
attgaggagtgcctgatta

SEQ ID NO: 2907 - DNA, 19 bp, Artificial
  Sequences of functional target portions for RNAi to inhibit        influenza virus.
ttgaggagtgcctgattaa

SEQ ID NO: 2908 - DNA, 19 bp, Artificial
  Sequences of functional target portions for RNAi to inhibit        influenza virus.
aggagtgcctgattaatga

SEQ ID NO: 2909 - DNA, 19 bp, Artificial
  Sequences of functional target portions for RNAi to inhibit        influenza virus.
gattaatgatccctgggtt

SEQ ID NO: 2910 - DNA, 19 bp, Artificial
  Sequences of functional target portions for RNAi to inhibit        influenza virus.
attaatgatccctgggttt

SEQ ID NO: 2911 - DNA, 19 bp, Artificial
  Sequences of functional target portions for RNAi to inhibit        influenza virus.
cttaatgcttcttggttca

SEQ ID NO: 2912 - DNA, 19 bp, Artificial
  Sequences of functional target portions for RNAi to inhibit        influenza virus.
gaaagcaggtagatattga

SEQ ID NO: 2913 - DNA, 19 bp, Artificial
  Sequences of functional target portions for RNAi to inhibit        influenza virus.
aagcaggtagatattgaaa

SEQ ID NO: 2914 - DNA, 19 bp, Artificial
  Sequences of functional target portions for RNAi to inhibit        influenza virus.
taaccgaggtcgaaacgta

SEQ ID NO: 2915 - DNA, 19 bp, Artificial
  Sequences of functional target portions for RNAi to inhibit        influenza virus.
gttctcatggaatggctaa

SEQ ID NO: 2916 - DNA, 19 bp, Artificial
  Sequences of functional target portions for RNAi to inhibit        influenza virus.
catggaatggctaaagaca

SEQ ID NO: 2917 - DNA, 19 bp, Artificial
  Sequences of functional target portions for RNAi to inhibit        influenza virus.
atggaatggctaaagacaa

SEQ ID NO: 2918 - DNA, 19 bp, Artificial
  Sequences of functional target portions for RNAi to inhibit        influenza virus.
tggaatggctaaagacaag

SEQ ID NO: 2919 - DNA, 19 bp, Artificial
  Sequences of functional target portions for RNAi to inhibit        influenza virus.
gatccaaataacatggaca

SEQ ID NO: 2920 - DNA, 19 bp, Artificial
  Sequences of functional target portions for RNAi to inhibit        influenza virus.
atccaaataacatggacaa

SEQ ID NO: 2921 - DNA, 19 bp, Artificial
  Sequences of functional target portions for RNAi to inhibit        influenza virus.
tccaaataacatggacaaa

SEQ ID NO: 2922 - DNA, 19 bp, Artificial
  Sequences of functional target portions for RNAi to inhibit        influenza virus.
ccaaataacatggacaaag

SEQ ID NO: 2923 - DNA, 19 bp, Artificial
  Sequences of functional target portions for RNAi to inhibit        influenza virus.
caaataacatggacaaagc

SEQ ID NO: 2924 - DNA, 19 bp, Artificial
  Sequences of functional target portions for RNAi to inhibit        influenza virus.
taacatggacaaagcagtt

SEQ ID NO: 2925 - DNA, 19 bp, Artificial
  Sequences of functional target portions for RNAi to inhibit        influenza virus.
gtctatgagggaagaatat

SEQ ID NO: 2926 - DNA, 19 bp, Artificial
  Sequences of functional target portions for RNAi to inhibit        influenza virus.
gctttcaggtagattgctt

We claim:

1. An RNAi-inducing agent targeted to an influenza virus transcript, wherein the RNAi-inducing agent comprises: a nucleic acid portion whose sequence comprises a sequence selected from the group consisting of: SEQ ID NOs: 272-380, its complement, or a fragment of either having a length of at least 15 nucleotides.

2. The RNAi-inducing agent of claim 1, wherein the sequence is selected from the group consisting of: SEQ ID NOs: 274, 286, 287, 292, 297, 298, 304, 305, 309, 310, 311, 319, 324, 327, 334, 346, 347, 360, 361, 364, and 366, its complement, or a fragment of either having a length of at least 15 nucleotides.

3. The RNAi-inducing agent of claim 1, wherein the sequence is selected from the group consisting of: SEQ ID NOs: 297, 309, 310, 311, 346, 347, 364, and 366, its complement, or a fragment of either having a length of at least 15 nucleotides.

4. The RNAi-inducing agent of claim 1, which is an siRNA comprising individual nucleic acid strands, one or both of which comprises a single-stranded overhang located at its 3′.

5. The RNAi-inducing agent of claim 1, which is an shRNA comprising first and second nucleic acid portions of a single nucleic acid that form a duplex, wherein the first and second nucleic acid portions are linked together by a single-stranded nucleic acid portion, and wherein the duplex further comprises a single-stranded overhang.

6. An RNAi-inducing agent identical to that of claim 1 except that the sequence of the nucleic acid portions differs at 1 or 2 positions with respect to nucleic acid portion of said RNAi-inducing agent.

7. A vector that comprises a template for transcription of the RNAi-inducing agent of claim 1, wherein the template is operably linked to a promoter.

8. A method of treating or preventing an influenza virus infection comprising administering the RNAi-inducing agent of claim 7 to a subject in need thereof.

9. A composition comprising the RNAi-inducing agent of claim 1 and a delivery agent.

10. The composition of claim 9, wherein the delivery agent is a cationic polymer.

11. The composition of claim 10, wherein the cationic polymer is selected from the group consisting of: PEI, PLL, PLA, and poly(beta) amino esters.

12. A method of treating or preventing an influenza virus infection comprising administering the RNAi-inducing agent of claim 1 to a subject in need thereof.

13. A method of diagnosis of influenza comprising the step of:
determining whether the subject is infected with an influenza virus that is susceptible to inhibition by the RNAi-inducing agent of claim 1.

14. The method of claim 13, further comprising the step of administering the RNAi-inducing agent to the subject.

15. An RNAi-inducing agent targeted to an influenza virus gene selected from the group consisting of the polymerase protein PB1 gene, the polymerase protein PB2 gene, the polymerase protein PA gene, and the nucleoprotein NP gene.

16. The RNAi-inducing agent of claim 15, wherein the gene is PB1.

17. The RNAi-inducing agent of claim 15, wherein the gene is PB2.

18. The RNAi-inducing agent of claim 15, wherein the gene is PA.

19. The RNAi-inducing agent of claim 15, wherein the gene is NP.

20. The RNAi-inducing agent of claim 15, wherein the agent is targeted to a target portion of the gene that is a functionally preferred target portion for RNAi.

21. The RNAi-inducing agent of claim 15, wherein the agent is targeted to a favorably conserved target portion of the gene.

22. The RNAi-inducing agent of claim 15, wherein the agent is targeted to a highly conserved target portion of the gene.

23. The RNAi-inducing agent of claim 15, wherein the RNAi-inducing agent comprises:
a nucleic acid portion that is 100% complementary to a target portion of the influenza virus gene over at least 15 consecutive nucleotides, wherein the target portion is a functionally preferred target for RNA.

24. An RNAi-inducing agent identical to that of claim 23 except that the nucleic acid portion differs at 1 or 2 positions with respect to the nucleic acid portion of said RNAi-inducing agent.

25. A vector that comprises a template for transcription of the RNAi-inducing agent of claim 15.

26. An isolated nucleic acid, or its complement, whose sequence comprises a sequence selected from the group consisting of SEQ ID NOs: 272-380, or comprises a fragment of a sequence selected from the group consisting of SEQ ID NOs: 272-380 having a length of at least 16 nucleotides, wherein the nucleic acid has a length of 100 nucleotides or less.

27. The nucleic acid of claim 26, wherein the sequence comprises a sequence selected from the group consisting of SEQ ID NOs: 274, 286, 287, 292, 297, 298, 304, 305, 309, 310, 311, 319, 324, 327, 334, 346, 347, 360, 361, 364, and 366, or comprises a fragment of a sequence selected from the group consisting of SEQ ID NOs: 274, 286, 287, 292, 297, 298, 304, 305, 310, 311, 319, 324, 327, 334,346, 347, 360, 361, 364, and 366 having a length of at least 16 nucleotides, wherein the nucleic acid has a length of 100 nucleotides or less.

28. The nucleic acid of claim 26, wherein the sequence comprises a sequence selected from the group consisting of SEQ ID NOs: 297, 309, 310, 311, 346, 347, 364, and 366, or comprises a fragment of a sequence selected from the group consisting of SEQ ID NOs: 297, 310, 311, 346, 347, 364, and 366, having a length of at least 16 nucleotides, wherein the nucleic acid has a length of 100 nucleotides or less.

29. The nucleic acid of claim 26, wherein the sequence comprises a sequence selected from the group consisting of SEQ ID NOs: 272-380.

30. The isolated nucleic acid of claim 26, further comprising a detectable moiety attached to the nucleic acid.

31. An RNAi-inducing agent comprising the nucleic acid of claim 26.

32. A vector that comprises a template for transcription of the RNAi-inducing agent of claim 26.

33. An isolated nucleic acid having the sequence n1-n2-n3-n4-n5-n6-n7-n8-n9-n10-n11-n12-n13-n14-n15-n16-n17-n18-n19 (N19) which is identical to a portion of an influenza virus gene selected from the group consisting of the polymerase protein PB1 gene, the polymerase protein PB2 gene, the polymerase protein PA gene, and the nucleoprotein NP gene or differs in that:
an A to G or C to U difference is allowed at any position;
a G to A or C to A difference is allowed only at positions n1, n18, and/or n19;
there are between 0, 1, 2, or 3 differences between N19 and the influenza virus sequence between positions n11 and n9;
there are no more than 2 consecutive differences; and
there is at most one difference between N19 and the influenza virus sequence between positions n11 and n17.

34. An RNAi-inducing agent targeted to the nucleic acid of claim 33.

35. An RNAi-inducing agent comprising the nucleic acid of claim 33.

36. A vector that comprises a template for transcription of the RNAi-inducing agent of claim 33.

37. A method of diagnosing influenza in a subject comprising the step of:
determining whether the subject is infected with an influenza virus strain that is susceptible to inhibition by an RNAi-inducing entity.

38. The method of claim 37 further comprising the step of:
administering the RNAi-inducing entity to the subject.

39. The method of claim 37, wherein the determining step comprises performing a nucleic acid based diagnostic assay.

40. A diagnostic kit comprising:
a primer or probe that detects an influenza virus gene over at least part of a target portion that is a favorably conserved target portion for RNAi.

41. The diagnostic kit of claim 40, wherein the favorably conserved target portion comprises a sequence selected from the group consisting of: SEQ ID NOs: 272-380.

42. A method of inhibiting expression of a gene in a tissue or organ of a mammalian subject comprising the step of:
introducing a composition comprising an effective amount of an RNAi-inducing agent targeted to the gene directly into the vascular system of the subject without using a hydrodynamic transfection technique.

43. The method of claim 42, wherein the organ is the lung.

44. The method of claim 42, wherein the composition comprises a cationic polymer.

45. The method of claim 42, wherein the gene is a gene of a virus that infects respiratory epithelial cells.

46. The method of claim 45, wherein the virus is an influenza virus.

47. The method of claim 42, wherein the effective amount is between approximately 0.1 mg/kg and 5 mg/kg of the subject's body weight.

48. The method of claim 42, wherein the effective amount reduces expression of the gene by at least 2-fold.

49. A method of inhibiting production of a virus in the respiratory system of a mammalian subject, wherein the virus infects respiratory epithelial cells, the method comprising the step of:
introducing a composition comprising an effective amount of an RNAi-inducing agent targeted to a gene of the virus into the vascular system of the subject by injection without using a hydrodynamic transfection technique.

50. The method of claim 49, wherein the composition comprises a cationic polymer.

51. The method of claim 49, wherein the virus is an influenza virus.

52. The method of claim 49, wherein the effective amount is between approximately 0.1 mg/kg and 5 mg/kg of the subject's body weight.

53. The method of claim 49, wherein the composition is administered to a subject who is not infected with the virus, prior to infection of the subject, and wherein the composition is effective to inhibit production of the virus when the subject subsequently becomes infected.

54. A method of inhibiting expression of a gene in the lung of a mammalian subject comprising the step of:
introducing a composition comprising an effective amount of an RNAi-inducing agent targeted to the gene and a delivery agent directly into the respiratory system of the subject.

55. The method of claim 54, wherein the composition is administered intranasally.

56. The method of claim 54, wherein the composition is administered by inhalation.

57. The method of claim 54, wherein the composition comprises a cationic polymer.

58. The method of claim 54, wherein the gene is a gene of a virus that infects respiratory epithelial cells.

59. The method of claim 58, wherein the virus is an influenza virus.

60. The method of claim 54, wherein the effective amount is between approximately 0.1 mg/kg and 5 mg/kg of the subject's body weight.

61. The method of claim 54, wherein the effective amount reduces expression of the gene by at least 2-fold.

62. The method of claim 54, wherein the composition is essentially free of delivery-enhancing polymers and lipids.

63. A method of inhibiting production of a virus in the respiratory system of a mammalian subject, wherein the virus infects respiratory epithelial cells, the method comprising the step of:
introducing a composition comprising an effective amount of an RNAi-inducing agent targeted to a gene of the virus directly into the respiratory system of the subject.

64. The method of claim 63, wherein the virus is an influenza virus.

65. The method of claim 63, wherein the composition is administered intranasally.

66. The method of claim 63, wherein the composition is administered by inhalation.

67. The method of claim 63, wherein the composition comprises a cationic polymer.

68. The method of claim 63, wherein the effective amount is between approximately 0.1 mg/kg and 5 mg/kg of the subject's body weight.

69. The method of claim 63, wherein the effective amount reduces production of the virus by at least 25%.

70. The method of claim 63, wherein the composition is essentially free of delivery-enhancing polymers and lipids.

71. The method of claim 63, wherein the composition is administered to a subject who is not infected with the virus, prior to infection of the subject, and wherein the composition is effective to inhibit production of the virus when the subject subsequently becomes infected.

72. A transgenic non-human animal that expresses an RNAi-inducing agent targeted to an influenza virus transcript.

73. The transgenic non-human animal of claim 72, wherein the animal is an avian.
